(19) United States
(12) Patent Application Publication
(10) Pub. No.: US 2025/0223587 A1
(43) Pub. Date: Jul. 10, 2025

(54) COMPOSITIONS AND METHODS FOR TREATING A CONGENITAL EYE DISEASE

(71) Applicant: Beam Therapeutics Inc., Cambridge, MA (US)

(72) Inventors: David Bryson, Cambridge, MA (US); Jack Sullivan, Cambridge, MA (US)

(73) Assignee: Beam Therapeutics Inc., Cambridge, MA (US)

(21) Appl. No.: 19/034,326

(22) Filed: Jan. 22, 2025

Related U.S. Application Data
(63) Continuation of application No. PCT/US2023/071249, filed on Jul. 28, 2023.
(60) Provisional application No. 63/369,881, filed on Jul. 29, 2022.

(51) Int. Cl. C12N 15/11; A61K 48/00; C12N 9/78; C12N 15/10

(52) U.S. Cl. CPC C12N 15/11; A61K 48/005; C12N 9/78; C12N 15/102; C12Y 305/04005; C12N 2310/20; C12N 2320/33; C12N 2320/34

(57) ABSTRACT

The present disclosure features compositions and methods for editing a 290-KD centrosomal protein (CEP290) gene to treat a congenital eye disorder, such as Leber's Congenital Amaurosis-10. In embodiments, the disclosure provides methods for direct correction of the IVS26 pathogenic mutation in the CEP290 gene (CEP290 c.2991+1655A>G) and/or disruption of a cryptic splice donor site within an intron of the CEP290 gene using a base editor (e.g., a cytidine deaminase base editor, an adenosine deaminase base editor, or a cytidine adenosine deaminase base editor (CABE)).

### CROSS REFERENCE TO RELATED APPLICATIONS

[0001] This application is a continuation under 35 U.S.C. § 111(a) of PCT International Patent Application No. PCT/US2023/071249, filed Jul. 28, 2023, designating the United States and published in English, which claims priority to and the benefit of U.S. Provisional Application No. 63/369,881, filed Jul. 29, 2022, the entire contents of each of which are incorporated by reference herein.

### SEQUENCE LISTING

[0002] This application contains a Sequence Listing which has been submitted electronically in XML format and is hereby incorporated by reference in its entirety. The Sequence Listing XML file, created on Mar. 28, 2025, is named 180802-055203US_SL.xml and is 1,006,640 bytes in size.

### BACKGROUND

[0003] Leber's Congenital Amaurosis-10 (LCA10) is a rare congenital eye disease that appears at birth or in the first few months of life. It affects about 1 in 40,000 newborns. The disease primarily affects the retina. People with the disease typically have severe visual impairment beginning in infancy, and the impairment can worsen progressively over time. Typically, LCA10 leads to progressive loss of all vision. There is a need for improved compositions and methods for treating LCA10.

### SUMMARY

[0004] As described below, the invention features compositions and methods for editing a 290-KD centrosomal protein (CEP290) gene to treat a congenital eye disorder, such as Leber's Congenital Amaurosis-10 (LCA10). In embodiments, the disclosure provides methods for direct correction of the IVS26 pathogenic mutation in the CEP290 gene (CEP290 c.2991+1655A>G) and/or disruption of a cryptic splice donor site within an intron of the CEP290 gene using a base editor (e.g., a cytidine deaminase base editor, an adenosine deaminase base editor, or a cytidine adenosine deaminase base editor (CABE)).

[0005] In one aspect, the invention features a method of editing a nucleobase of a 290-KD centrosomal protein (CEP290) polynucleotide in a cell. The method involves contacting the cell with a base editor polypeptide containing (a) a nucleic acid programmable DNA binding protein (napDNAbp) domain and a deaminase domain, or (b) one or more polynucleotides encoding the base editor. The method further involves contacting the cell with one or more guide polynucleotides, or one or more polynucleotides encoding the one or more guide polynucleotides, where the guide polynucleotides target the base editor to effect an alteration of the nucleobase of the CEP290 polynucleotide in the cell.

[0006] In another aspect, the invention features a method of treating Leber's Congenital Amaurosis-10 (LCA10) in a subject in need thereof, the method involves contacting a cell in the subject with a base editor polypeptide containing (a) a nucleic acid programmable DNA binding protein (napDNAbp) domain and a deaminase domain, or (b) one or more polynucleotides encoding the base editor. The method further involves contacting the cell with one or more guide polynucleotides, or one or more polynucleotides encoding the one or more guide polynucleotides, where the guide polynucleotides target the base editor to effect an alteration of a nucleobase of a 290-KD centrosomal protein (CEP290) polynucleotide in the cell, thereby treating LCA10 in the subject.

[0007] In another aspect, the invention features a modified cell containing an alteration in a nucleobase of a CEP290 polynucleotide. The alteration increases expression and/or activity of the encoded CEP290 polypeptide as compared to a control cell without the alteration. The cell is prepared according to the method of any one of the above aspects, or embodiments thereof.

[0008] In another aspect, the invention features a base editor system containing two polynucleotides together encoding a base editor polypeptide. The base editor polypeptide contains a nucleic acid programmable DNA binding protein (napDNAbp) domain and a deaminase domain. A first polynucleotide encodes a fusion protein containing an N-terminal fragment of the base editor fused to a split intein-N. A second polynucleotide encodes a fusion protein containing the remaining C-terminal fragment the base editor fused to a split intein-C. The base editor system also contains one or more guide polynucleotides, or one or more polynucleotides encoding the one or more guide polynucleotides, where the one or more guide polynucleotides contain a spacer containing at least 10 contiguous nucleotides of a spacer corresponding to a nucleic acid sequence selected from one or more of:

(SEQ ID NO: 459)
AUACUCACAAUUACAAC;
(SEQ ID NO: 460)
GAUACUCACAAUUACAAC;
(SEQ ID NO: 461)
AGAUACUCACAAUUACAAC;
(SEQ ID NO: 462)
GAGAUACUCACAAUUACAAC;
(SEQ ID NO: 463)
UGAGAUACUCACAAUUACAAC;
(SEQ ID NO: 464)
AUGAGAUACUCACAAUUACAAC;
(SEQ ID NO: 465)
UAUCUCUGAUGAGUCCGUGAGGACGAAACGAGUAAGCUCGUCAGA
UACUCACAAUUACAAC;
(SEQ ID NO: 466)
AUCUCACUGAUGAGUCCGUGAGGACGAAACGAGUAAGCUCGUCUG
AGAUACUCACAAUUACAAC;
(SEQ ID NO: 467)
UAUCUCAUCUGAUGAGUCCGUGAGGACGAAACGAGUAAGCUCGUC
AUGAGAUACUCACAAUUACAAC;
(SEQ ID NO: 468)
CUCAUACUGAUGAGUCCGUGAGGACGAAACGAGUAAGCUCGUCUA
UGAGAUACUCACAAUUACAAC;
(SEQ ID NO: 469)
ACUCACAAUUACAACUG;
(SEQ ID NO: 4700)
UACUCACAAUUACAACUG;
(SEQ ID NO: 471)
AUACUCACAAUUACAACUG;
(SEQ ID NO: 472)
GAUACUCACAAUUACAACUG;
(SEQ ID NO: 473)
AGAUACUCACAAUUACAACUG;
(SEQ ID NO: 474)
CAAUUACAACUGGGGCC;
(SEQ ID NO: 475)
ACAAUUACAACUGGGGCC;
(SEQ ID NO: 476)
CACAAUUACAACUGGGGCC;
(SEQ ID NO: 477)
UCACAAUUACAACUGGGGCC;
(SEQ ID NO: 478)
CUCACAAUUACAACUGGGGCC;
and
(SEQ ID NO: 479)
ACUCACAAUUACAACUGGGGCC.

[0009] In another aspect, the invention features a base editor system containing one or more polynucleotides encoding a base editor polypeptide. The base editor polypeptide contains a nucleic acid programmable DNA binding protein (napDNAbp) domain and a deaminase domain. The base editor system also contains one or more guide polynucleotides, or one or more polynucleotides encoding the one or more guide polynucleotides, wherein the one or more guide polynucleotides, where the guide polynucleotides contain a spacer sequence containing at least 10 contiguous nucleotides of a spacer corresponding to a nucleic acid sequence selected from one or more of:

(SEQ ID NO: 459)
AUACUCACAAUUACAAC;
(SEQ ID NO: 460)
GAUACUCACAAUUACAAC;
(SEQ ID NO: 461)
AGAUACUCACAAUUACAAC;
(SEQ ID NO: 462)
GAGAUACUCACAAUUACAAC;
(SEQ ID NO: 463)
UGAGAUACUCACAAUUACAAC;
(SEQ ID NO: 464)
AUGAGAUACUCACAAUUACAAC;
(SEQ ID NO: 465)
UAUCUCUGAUGAGUCCGUGAGGACGAAACGAGUAAGCUCGUCAGA
UACUCACAAUUACAAC;
(SEQ ID NO: 466)
AUCUCACUGAUGAGUCCGUGAGGACGAAACGAGUAAGCUCGUCUG
AGAUACUCACAAUUACAAC;
(SEQ ID NO: 467)
UAUCUCAUCUGAUGAGUCCGUGAGGACGAAACGAGUAAGCUCGUC
AUGAGAUACUCACAAUUACAAC;
(SEQ ID NO: 468)
CUCAUACUGAUGAGUCCGUGAGGACGAAACGAGUAAGCUCGUCUA
UGAGAUACUCACAAUUACAAC;
(SEQ ID NO: 469)
ACUCACAAUUACAACUG;
(SEQ ID NO: 4700)
UACUCACAAUUACAACUG;
(SEQ ID NO: 471)
AUACUCACAAUUACAACUG;
(SEQ ID NO: 472)
GAUACUCACAAUUACAACUG;
(SEQ ID NO: 473)
AGAUACUCACAAUUACAACUG;
(SEQ ID NO: 474)
CAAUUACAACUGGGGCC;
(SEQ ID NO: 475)
ACAAUUACAACUGGGGCC;
(SEQ ID NO: 476)
CACAAUUACAACUGGGGCC;
(SEQ ID NO: 477)
UCACAAUUACAACUGGGGCC;
(SEQ ID NO: 478)
CUCACAAUUACAACUGGGGCC;
and
(SEQ ID NO: 479)
ACUCACAAUUACAACUGGGGCC.

[0010] In another aspect, the invention features a set of one or more polynucleotides encoding the base editor system of any aspect provided herein, or embodiments thereof, or a component thereof.

[0011] In another aspect, the invention features a vector containing a set of one or more polynucleotides of any aspect provided herein, or embodiments thereof.

[0012] In another aspect, the invention features a kit containing a base editor system containing a base editor polypeptide, or one or more polynucleotides encoding the same. The base editor polypeptide contains a nucleic acid programmable DNA binding protein (napDNAbp) domain and a deaminase domain. The base editor system also contains one or more guide polynucleotides containing, or one or more polynucleotides encoding the one or more guide polynucleotides, wherein the one or more guide polynucleotides contain a nucleic acid sequence selected from one or more of:

(SEQ ID NO: 459)
AUACUCACAAUUACAAC;
(SEQ ID NO: 460)
GAUACUCACAAUUACAAC;
(SEQ ID NO: 461)
AGAUACUCACAAUUACAAC;
(SEQ ID NO: 462)
GAGAUACUCACAAUUACAAC;
(SEQ ID NO: 463)
UGAGAUACUCACAAUUACAAC;
(SEQ ID NO: 464)
AUGAGAUACUCACAAUUACAAC;
(SEQ ID NO: 465)
UAUCUCUGAUGAGUCCGUGAGGACGAAACGAGUAAGCUCGUCAGA
UACUCACAAUUACAAC;
(SEQ ID NO: 466)
AUCUCACUGAUGAGUCCGUGAGGACGAAACGAGUAAGCUCGUCUG
AGAUACUCACAAUUACAAC;
(SEQ ID NO: 467)
UAUCUCAUCUGAUGAGUCCGUGAGGACGAAACGAGUAAGCUCGUC
AUGAGAUACUCACAAUUACAAC;
(SEQ ID NO: 468)
CUCAUACUGAUGAGUCCGUGAGGACGAAACGAGUAAGCUCGUCUA
UGAGAUACUCACAAUUACAAC;
(SEQ ID NO: 469)
ACUCACAAUUACAACUG;
(SEQ ID NO: 4700)
UACUCACAAUUACAACUG;
(SEQ ID NO: 471)
AUACUCACAAUUACAACUG;
(SEQ ID NO: 472)
GAUACUCACAAUUACAACUG;
(SEQ ID NO: 473)
AGAUACUCACAAUUACAACUG;
(SEQ ID NO: 474)
CAAUUACAACUGGGGCC;
(SEQ ID NO: 475)
ACAAUUACAACUGGGGCC;
(SEQ ID NO: 476)
CACAAUUACAACUGGGGCC;
(SEQ ID NO: 477)
UCACAAUUACAACUGGGGCC;
(SEQ ID NO: 478)
CUCACAAUUACAACUGGGGCC;
and
(SEQ ID NO: 479)
ACUCACAAUUACAACUGGGGCC.

[0013] In another aspect, the invention features a pharmaceutical composition containing an effective amount of a base editor system containing (a) a base editor polypeptide or one or (b) more polynucleotides encoding the base editor polypeptide. The base editor polypeptide contains a nucleic acid programmable DNA binding protein (napDNAbp) domain and a deaminase domain. The pharmaceutical composition also contains one or more guide polynucleotides, or one or more polynucleotides encoding the one or more guide polynucleotides, where the one or more guide polynucleotides contain a nucleic acid sequence selected from one or more of:

(SEQ ID NO: 459)
AUACUCACAAUUACAAC;
(SEQ ID NO: 460)
GAUACUCACAAUUACAAC;
(SEQ ID NO: 461)
AGAUACUCACAAUUACAAC;
(SEQ ID NO: 462)
GAGAUACUCACAAUUACAAC;
(SEQ ID NO: 463)
UGAGAUACUCACAAUUACAAC;
(SEQ ID NO: 464)
AUGAGAUACUCACAAUUACAAC;
(SEQ ID NO: 465)
UAUCUCUGAUGAGUCCGUGAGGACGAAACGAGUAAGCUCGUCAGA
UACUCACAAUUACAAC;
(SEQ ID NO: 466)
AUCUCACUGAUGAGUCCGUGAGGACGAAACGAGUAAGCUCGUCUG
AGAUACUCACAAUUACAAC;
(SEQ ID NO: 467)
UAUCUCAUCUGAUGAGUCCGUGAGGACGAAACGAGUAAGCUCGUC
AUGAGAUACUCACAAUUACAAC;
(SEQ ID NO: 468)
CUCAUACUGAUGAGUCCGUGAGGACGAAACGAGUAAGCUCGUCUA
UGAGAUACUCACAAUUACAAC;
(SEQ ID NO: 469)
ACUCACAAUUACAACUG;
(SEQ ID NO: 4700)
UACUCACAAUUACAACUG;
(SEQ ID NO: 471)
AUACUCACAAUUACAACUG;
(SEQ ID NO: 472)
GAUACUCACAAUUACAACUG;
(SEQ ID NO: 473)
AGAUACUCACAAUUACAACUG;
(SEQ ID NO: 474)
CAAUUACAACUGGGGCC;
(SEQ ID NO: 475)
ACAAUUACAACUGGGGCC;
(SEQ ID NO: 476)
CACAAUUACAACUGGGGCC;
(SEQ ID NO: 477)
UCACAAUUACAACUGGGGCC;
(SEQ ID NO: 478)
CUCACAAUUACAACUGGGGCC;
and
(SEQ ID NO: 479)
ACUCACAAUUACAACUGGGGCC.

[0014] In another aspect, the invention features a guide polynucleotide, or a polynucleotide encoding the guide polynucleotide, where the guide polynucleotide contains a nucleotide sequence selected from one or more of:

(SEQ ID NO: 438)
GAUACUCACAAUUACAACGUUUUAGAGCUAGAAAUAGCAAGUUAA
AAUAAGGCUAGUCCGUUAUCAACUUGAAAAAGUGGCACCGAGUCG
GUGCUUUUUU;
(SEQ ID NO: 439)
gGAUACUCACAAUUACAACGUUUUAGAGCUAGAAAUAGCAAGUUA
AAAUAAGGCUAGUCCGUUAUCAACUUGAAAAAGUGGCACCGAGUC
GGUGCUUUUUU;
(SEQ ID NO: 440)
GAGAUACUCACAAUUACAACGUUUUAGAGCUAGAAAUAGCAAGUU
AAAAUAAGGCUAGUCCGUUAUCAACUUGAAAAAGUGGCACCGAGU
CGGUGCUUUUUU;
(SEQ ID NO: 441)
gGAGAUACUCACAAUUACAACGUUUUAGAGCUAGAAAUAGCAAGU
UAAAAUAAGGCUAGUCCGUUAUCAACUUGAAAAAGUGGCACCGAG
UCGGUGCUUUUUU;
(SEQ ID NO: 442)
gUGAGAUACUCACAAUUACAACGUUUUAGAGCUAGAAAUAGCAAG
UUAAAAUAAGGCUAGUCCGUUAUCAACUUGAAAAAGUGGCACCGA
GUCGGUGCUUUUUU;
(SEQ ID NO: 443)
gAUGAGAUACUCACAAUUACAACGUUUUAGAGCUAGAAAUAGCAA
GUUAAAAUAAGGCUAGUCCGUUAUCAACUUGAAAAAGUGGCACCG
AGUCGGUGCUUUUUU;
(SEQ ID NO: 444)
GUAUCUCUGAUGAGUCCGUGAGGACGAAACGAGUAAGCUCGUCAG
AUACUCACAAUUACAACGUUUUAGAGCUAGAAAUAGCAAGUUAAA
AUAAGGCUAGUCCGUUAUCAACUUGAAAAAGUGGCACCGAGUCGG
UGCUUUUUU;
(SEQ ID NO: 445)
gAUCUCACUGAUGAGUCCGUGAGGACGAAACGAGUAAGCUCGUCU
GAGAUACUCACAAUUACAACGUUUUAGAGCUAGAAAUAGCAAGUU
AAAAUAAGGCUAGUCCGUUAUCAACUUGAAAAAGUGGCACCGAGU
CGGUGCUUUUUU;
(SEQ ID NO: 446)
gUAUCUCAUCUGAUGAGUCCGUGAGGACGAAACGAGUAAGCUCGU
CAUGAGAUACUCACAAUUACAACGUUUUAGAGCUAGAAAUAGCAA
GUUAAAAUAAGGCUAGUCCGUUAUCAACUUGAAAAAGUGGCACCG
AGUCGGUGCUUUUUU;
(SEQ ID NO: 447)
gCUCAUACUGAUGAGUCCGUGAGGACGAAACGAGUAAGCUCGUCU
AUGAGAUACUCACAAUUACAACGUUUUAGAGCUAGAAAUAGCAAG
UUAAAAUAAGGCUAGUCCGUUAUCAACUUGAAAAAGUGGCACCGA
GUCGGUGCUUUUUU;
(SEQ ID NO: 448)
gACUCACAAUUACAACUGGUUUUAGAGCUAGAAAUAGCAAGUUAA
AAUAAGGCUAGUCCGUUAUCAACUUGAAAAAGUGGCACCGAGUCG
GUGCUUUUUU;
(SEQ ID NO: 449)
gUACUCACAAUUACAACUGGUUUUAGAGCUAGAAAUAGCAAGUUA
AAAUAAGGCUAGUCCGUUAUCAACUUGAAAAAGUGGCACCGAGUC
GGUGCUUUUUU;
(SEQ ID NO: 450)
GAUACUCACAAUUACAACUGGUUUUAGAGCUAGAAAUAGCAAGUU
AAAAUAAGGCUAGUCCGUUAUCAACUUGAAAAAGUGGCACCGAGU
CGGUGCUUUUUU;
(SEQ ID NO: 451)
gGAUACUCACAAUUACAACUGGUUUUAGAGCUAGAAAUAGCAAGU
UAAAAUAAGGCUAGUCCGUUAUCAACUUGAAAAAGUGGCACCGAG
UCGGUGCUUUUUU;
(SEQ ID NO: 452)
GAGAUACUCACAAUUACAACUGGUUUUAGAGCUAGAAAUAGCAAG
UUAAAAUAAGGCUAGUCCGUUAUCAACUUGAAAAAGUGGCACCGA
GUCGGUGCUUUUUU;
(SEQ ID NO: 453)
gCAAUUACAACUGGGGCCGUUUUAGAGCUAGAAAUAGCAAGUUAA
AAUAAGGCUAGUCCGUUAUCAACUUGAAAAAGUGGCACCGAGUCG
GUGCUUUUUU;
(SEQ ID NO: 454)
gACAAUUACAACUGGGGCCGUUUUAGAGCUAGAAAUAGCAAGUUA
AAAUAAGGCUAGUCCGUUAUCAACUUGAAAAAGUGGCACCGAGUC
GGUGCUUUUUU;
(SEQ ID NO: 455)
gCACAAUUACAACUGGGGCCGUUUUAGAGCUAGAAAUAGCAAGUU
AAAAUAAGGCUAGUCCGUUAUCAACUUGAAAAAGUGGCACCGAGU
CGGUGCUUUUUU;
(SEQ ID NO: 456)
gUCACAAUUACAACUGGGGCCGUUUUAGAGCUAGAAAUAGCAAGU
UAAAAUAAGGCUAGUCCGUUAUCAACUUGAAAAAGUGGCACCGAG
UCGGUGCUUUUUU;
(SEQ ID NO: 457)
gCUCACAAUUACAACUGGGGCCGUUUUAGAGCUAGAAAUAGCAAG
UUAAAAUAAGGCUAGUCCGUUAUCAACUUGAAAAAGUGGCACCGA
GUCGGUGCUUUUUU;
(SEQ ID NO: 458)
gACUCACAAUUACAACUGGGGCCGUUUUAGAGCUAGAAAUAGCAA
GUUAAAAUAAGGCUAGUCCGUUAUCAACUUGAAAAAGUGGCACCG
AGUCGGUGCUUUUUU;
(SEQ ID NO: 459)
AUACUCACAAUUACAAC;
(SEQ ID NO: 460)
GAUACUCACAAUUACAAC;
(SEQ ID NO: 461)
AGAUACUCACAAUUACAAC;
(SEQ ID NO: 462)
GAGAUACUCACAAUUACAAC;
(SEQ ID NO: 463)
UGAGAUACUCACAAUUACAAC;
(SEQ ID NO: 464)
AUGAGAUACUCACAAUUACAAC;
(SEQ ID NO: 465)
UAUCUCUGAUGAGUCCGUGAGGACGAAACGAGUAAGCUCGUCAGA
UACUCACAAUUACAAC;
(SEQ ID NO: 466)
AUCUCACUGAUGAGUCCGUGAGGACGAAACGAGUAAGCUCGUCUG
AGAUACUCACAAUUACAAC;
(SEQ ID NO: 467)
UAUCUCAUCUGAUGAGUCCGUGAGGACGAAACGAGUAAGCUCGUC
AUGAGAUACUCACAAUUACAAC;
(SEQ ID NO: 468)
CUCAUACUGAUGAGUCCGUGAGGACGAAACGAGUAAGCUCGUCUA
UGAGAUACUCACAAUUACAAC;
(SEQ ID NO: 469)
ACUCACAAUUACAACUG;
(SEQ ID NO: 4700)
UACUCACAAUUACAACUG;
(SEQ ID NO: 471)
AUACUCACAAUUACAACUG;
(SEQ ID NO: 472)
GAUACUCACAAUUACAACUG;
(SEQ ID NO: 473)
AGAUACUCACAAUUACAACUG;
(SEQ ID NO: 474)
CAAUUACAACUGGGGCC;
(SEQ ID NO: 475)
ACAAUUACAACUGGGGCC;
(SEQ ID NO: 476)
CACAAUUACAACUGGGGCC;
(SEQ ID NO: 477)
UCACAAUUACAACUGGGGCC;
(SEQ ID NO: 478)
CUCACAAUUACAACUGGGGCC;
(SEQ ID NO: 479)
andACUCACAAUUACAACUGGGGCC.

[0015] In any aspect provided herein, or embodiments thereof, the base editor effects a reversion of a pathogenic mutation to a non-pathogenic nucleotide. In any aspect provided herein, or embodiments thereof, the nucleobase is in an intron. In any aspect provided herein, or embodiments thereof, the alteration of the nucleobase disrupts a splice donor site. In embodiments, the splice donor site is a cryptic splice donor site. In any aspect provided herein, or embodiments thereof, the altered nucleobase in the CEP290 polynucleotide is associated with an alteration in splicing. In any aspect provided herein, or embodiments thereof, alteration of the nucleobase is associated with an increase in proper splicing of mRNA transcripts transcribed from the CEP290 polynucleotide. In any aspect provided herein, or embodiments thereof, the alteration is associated with an increase in levels of functional CEP290 polypeptides in the cell.

[0016] In any aspect provided herein, or embodiments thereof, the method further involves alleviating one or more symptoms of LCA10 in the subject. In any aspect provided herein, or embodiments thereof, the method further involves slowing or halting progression of vision loss associated with LCA10 in the subject. In any aspect provided herein, or embodiments thereof, the method further involves reducing loss of functional rod and/or cone cells associated with LCA10 in the subject.

[0017] In any aspect provided herein, or embodiments thereof, the base editor effects an alteration of a nucleobase selected from one or more of CEP290 c.2991+1651, CEP290 c.2991+1652, and CEP290 c.2991+1655. In any aspect provided herein, or embodiments thereof, the base editor effects a CEP290 c.2991+1655G>A alteration. In any aspect provided herein, or embodiments thereof, the base editor effects a CEP290 c.2991+1652T>C alteration. In any aspect provided herein, or embodiments thereof, the base editor effects a CEP290 c.2991+1652G>A alteration.

[0018] In any aspect provided herein, or embodiments thereof, the one or more guide polynucleotides contains a spacer containing from about 18 to about 23 nucleotides. In any aspect provided herein, or embodiments thereof, the one or more guide polynucleotides contains a spacer containing 19, 20, or 21 nucleotides. In any aspect provided herein, or embodiments thereof, the one or more guide polynucleotides contains a nucleic acid sequence containing at least 10 contiguous nucleotides of a spacer corresponding to a nucleic acid sequence selected from one or more of:

(SEQ ID NO: 459)
AUACUCACAAUUACAAC;
(SEQ ID NO: 460)
GAUACUCACAAUUACAAC;
(SEQ ID NO: 461)
AGAUACUCACAAUUACAAC;
(SEQ ID NO: 462)
GAGAUACUCACAAUUACAAC;
(SEQ ID NO: 463)
UGAGAUACUCACAAUUACAAC;
(SEQ ID NO: 464)
AUGAGAUACUCACAAUUACAAC;
(SEQ ID NO: 465)
UAUCUCUGAUGAGUCCGUGAGGACGAAACGAGUAAGCUCGUCAGA
UACUCACAAUUACAAC;
(SEQ ID NO: 466)
AUCUCACUGAUGAGUCCGUGAGGACGAAACGAGUAAGCUCGUCUG
AGAUACUCACAAUUACAAC;
(SEQ ID NO: 467)
UAUCUCAUCUGAUGAGUCCGUGAGGACGAAACGAGUAAGCUCGUC
AUGAGAUACUCACAAUUACAAC;
(SEQ ID NO: 468)
CUCAUACUGAUGAGUCCGUGAGGACGAAACGAGUAAGCUCGUCUA
UGAGAUACUCACAAUUACAAC;
(SEQ ID NO: 469)
ACUCACAAUUACAACUG;
(SEQ ID NO: 4700)
UACUCACAAUUACAACUG;
(SEQ ID NO: 471)
AUACUCACAAUUACAACUG;
(SEQ ID NO: 472)
GAUACUCACAAUUACAACUG;
(SEQ ID NO: 473)
AGAUACUCACAAUUACAACUG;
(SEQ ID NO: 474)
CAAUUACAACUGGGGCC;
(SEQ ID NO: 475)
ACAAUUACAACUGGGGCC;
(SEQ ID NO: 476)
CACAAUUACAACUGGGGCC;
(SEQ ID NO: 477)
UCACAAUUACAACUGGGGCC;
(SEQ ID NO: 478)
CUCACAAUUACAACUGGGGCC;
and
(SEQ ID NO: 479)
ACUCACAAUUACAACUGGGGCC.

In any aspect provided herein, or embodiments thereof, the one or more guide polynucleotides contains a sequence selected from one or more of:

(SEQ ID NO: 459)
AUACUCACAAUUACAAC;
(SEQ ID NO: 460)
GAUACUCACAAUUACAAC;
(SEQ ID NO: 461)
AGAUACUCACAAUUACAAC;
(SEQ ID NO: 462)
GAGAUACUCACAAUUACAAC;
(SEQ ID NO: 463)
UGAGAUACUCACAAUUACAAC;
(SEQ ID NO: 464)
AUGAGAUACUCACAAUUACAAC;
(SEQ ID NO: 465)
UAUCUCUGAUGAGUCCGUGAGGACGAAACGAGUAAGCUCGUCAGA
UACUCACAAUUACAAC;
(SEQ ID NO: 466)
AUCUCACUGAUGAGUCCGUGAGGACGAAACGAGUAAGCUCGUCUG
AGAUACUCACAAUUACAAC;
(SEQ ID NO: 467)
UAUCUCAUCUGAUGAGUCCGUGAGGACGAAACGAGUAAGCUCGUC
AUGAGAUACUCACAAUUACAAC;
(SEQ ID NO: 468)
CUCAUACUGAUGAGUCCGUGAGGACGAAACGAGUAAGCUCGUCUA
UGAGAUACUCACAAUUACAAC;
(SEQ ID NO: 469)
ACUCACAAUUACAACUG;
(SEQ ID NO: 4700)
UACUCACAAUUACAACUG;
(SEQ ID NO: 471)
AUACUCACAAUUACAACUG;
(SEQ ID NO: 472)
GAUACUCACAAUUACAACUG;
(SEQ ID NO: 473)
AGAUACUCACAAUUACAACUG;
(SEQ ID NO: 474)
CAAUUACAACUGGGGCC;
(SEQ ID NO: 475)
ACAAUUACAACUGGGGCC;
(SEQ ID NO: 476)
CACAAUUACAACUGGGGCC;
(SEQ ID NO: 477)
UCACAAUUACAACUGGGGCC;
(SEQ ID NO: 478)
CUCACAAUUACAACUGGGGCC;
and
(SEQ ID NO: 479)
ACUCACAAUUACAACUGGGGCC.

In any aspect provided herein, or embodiments thereof, the one or more guide polynucleotides contains a scaffold containing a nucleotide sequence with at least about 85% sequence identity to the following sequence:

(SEQ ID NO: 484)
GUUUUAGAGCUAGAAAUAGCAAGUUAAAAUAAGGCUAGUCCGUUAUCAA
CUUGAAAAAGUGGCACCGAGUCGGUGCUUUUUU.

In any aspect provided herein, or embodiments thereof, one or more guide polynucleotides contains a modified nucleotide. In any aspect provided herein, or embodiments thereof, the one or more guide polynucleotides contains one or more of a 2′-OMe and a phosphorothioate.

[0019] In any aspect provided herein, or embodiments thereof, the method involves (i) contacting the cell with a first polynucleotide encoding a fusion protein containing an N-terminal fragment of the base editor fused to a split intein-N, and (ii) contacting the cell with a second polynucleotide encoding a fusion protein containing the remaining C-terminal fragment of the base editor fused to a split intein-C. In any aspect provided herein, or embodiments thereof, the C-terminal amino acid of the N-terminal fragment of the base editor is positioned within the napDNAbp domain of the base editor. In any aspect provided herein, or embodiments thereof, the C-terminal amino acid of the N-terminal fragment of the base editor corresponds to position 573 of the napDNAbp and the N-terminal amino acid of the C-terminal fragment of the base editor corresponds to position 574 of the napDNAbp, wherein the napDNAbp amino acid position is referenced to the following sequence:

SpCas9
(SEQ ID NO: 197)
MDKKYSIGLDIGTNSVGWAVITDEYKVPSKKFKVLGNTDRHSIKKNLIGALLFDSGETAEAT
RLKRTARRRYTRRKNRICYLQEIFSNEMAKVDDSFFHRLEESFLVEEDKKHERHPIFGNIVD
EVAYHEKYPTIYHLRKKLVDSTDKADLRLIYLALAHMIKFRGHFLIEGDLNPDNSDVDKLFI
QLVQTYNQLFEENPINASGVDAKAILSARLSKSRRLENLIAQLPGEKKNGLFGNLIALSLGL
TPNFKSNFDLAEDAKLQLSKDTYDDDLDNLLAQIGDQYADLFLAAKNLSDAILLSDILRVNT
EITKAPLSASMIKRYDEHHQDLTLLKALVRQQLPEKYKEIFFDQSKNGYAGYIDGGASQEEF
YKFIKPILEKMDGTEELLVKLNREDLLRKQRTFDNGSIPHQIHLGELHAILRRQEDFYPFLK
DNREKIEKILTFRIPYYVGPLARGNSRFAWMTRKSEETITPWNFEEVVDKGASAQSFIERMT
NFDKNLPNEKVLPKHSLLYEYFTVYNELTKVKYVTEGMRKPAFLSGEQKKAIVDLLFKTNRK
VTVKQLKEDYFKKIECFDSVEISGVEDRFNASLGTYHDLLKIIKDKDFLDNEENEDILEDIV
LTLTLFEDREMIEERLKTYAHLFDDKVMKQLKRRRYTGWGRLSRKLINGIRDKQSGKTILDF
LKSDGFANRNFMQLIHDDSLTFKEDIQKAQVSGQGDSLHEHIANLAGSPAIKKGILQTVKVV
DELVKVMGRHKPENIVIEMARENQTTQKGQKNSRERMKRIEEGIKELGSQILKEHPVENTQL
QNEKLYLYYLQNGRDMYVDQELDINRLSDYDVDHIVPQSFLKDDSIDNKVLTRSDKNRGKSD
NVPSEEVVKKMKNYWRQLLNAKLITQRKFDNLTKAERGGLSELDKAGFIKRQLVETRQITKH
VAQILDSRMNTKYDENDKLIREVKVITLKSKLVSDFRKDFQFYKVREINNYHHAHDAYLNAV
VGTALIKKYPKLESEFVYGDYKVYDVRKMIAKSEQEIGKATAKYFFYSNIMNFFKTEITLAN
GEIRKRPLIETNGETGEIVWDKGRDFATVRKVLSMPQVNIVKKTEVQTGGFSKESILPKRNS
DKLIARKKDWDPKKYGGFDSPTVAYSVLVVAKVEKGKSKKLKSVKELLGITIMERSSFEKNP
IDFLEAKGYKEVKKDLIIKLPKYSLFELENGRKRMLASAGELQKGNELALPSKYVNFLYLAS
HYEKLKGSPEDNEQKQLFVEQHKHYLDEIIEQISEFSKRVILADANLDKVLSAYNKHRDKPI
REQAENIIHLFTLTNLGAPAAFKYFDTTIDRKRYTSTKEVLDATLIHQSITGLYETRIDLSQ
LGGD.

In any aspect provided herein, or embodiments thereof, the split intein-N and split intein-C are components of a split intein selected from one or more of a Cfa, Cfa(GEP), Gp41.1, Gp41.8, IMPDH.1, NrdJ.1, and Npu. In any aspect provided herein, or embodiments thereof, the split intein-N and/or split intein-C contains an amino acid sequence selected from those corresponding to SEQ ID NOs: 371, 373, 375, 377, 390, 392, 394, 396, 398, 400, 401, 402, 490, 492, 494, 496, 498, 500, 502, 504, 506, 508, 509, and 510, or functional fragments thereof.

[0020] In any aspect provided herein, or embodiments thereof, the method further involves contacting the cell with a vector containing polynucleotide(s) encoding the base editor and/or the one or more guide polynucleotides. In any aspect provided herein, or embodiments thereof, the vector contains a lipid nanoparticle. In any aspect provided herein, or embodiments thereof, the vector is an adeno-associated virus (AAV) vector. In any aspect provided herein, or embodiments thereof, the AAV vector is an AAV5, PHB.EB, or PHP.B viral vector.

[0021] In any aspect provided herein, or embodiments thereof, the one or more polynucleotides encoding the base editor and/or one or more guide polynucleotides contain a promoter controlling expression of the base editor and/or one or more guide polynucleotides. In any aspect provided herein, or embodiments thereof, the promoter is selected from one or more of CMV, PR1.7, hG1.7, hGRK, and U6. In any aspect provided herein, or embodiments thereof, the promoter is selected from one or more of PR1.7, hG1.7, and hGRK. In any aspect provided herein, or embodiments thereof, the promoter facilitates expression of the base editor and/or one or more of the guide polynucleotides in a cone cell. In any aspect provided herein, or embodiments thereof, the promoter facilitates expression of the base editor and/or one or more of the guide polynucleotides in a rod cell.

[0022] In any aspect provided herein, or embodiments thereof, the napDNAbp domain contains a Cas9, Cas12a/Cpf1, Cas12b/C2c1, Cas12c/C2c3, Cas12d/CasY, Cas12e/CasX, Cas12g, Cas12h, Cas12i, or Cas12j/CasΦ polynucleotide or a functional portion thereof. In any aspect provided herein, or embodiments thereof, the napDNAbp domain contains a Cas9 polynucleotide or a functional portion thereof. In any aspect provided herein, or embodiments thereof, the napDNAbp domain contains a dead Cas9 (dCas9) or a Cas9 nickase (nCas9). In any aspect provided herein, or embodiments thereof, the napDNAbp domain contains a Staphylococcus aureus Cas9 (SaCas9), Streptococcus thermophilus 1 Cas9 (St1Cas9), a Streptococcus pyogenes Cas9 (SpCas9), or variants thereof. In any aspect provided herein, or embodiments thereof, the napDNAbp domain contains an SpCas9, or a variant thereof. In any aspect provided herein, or embodiments thereof, the napDNAbp domain contains a variant of SpCas9 having an altered protospacer-adjacent motif (PAM) specificity. In any aspect provided herein, or embodiments thereof, the SpCas9 variant recognizes a PAM sequence selected from the group consisting of NGA, NGCG, NNNRRT, NGCG, NGCN, NGTN, and NGC.

[0023] In any aspect provided herein, or embodiments thereof, the deaminase domain is an adenosine deaminase, a cytidine deaminase domain, or a cytidine adenosine deaminase domain. In any aspect provided herein, or embodiments thereof, the adenosine deaminase domain converts a target A⋅T to G⋅C in the CEP290 polynucleotide. In any aspect provided herein, or embodiments thereof, the cytidine deaminase domain converts a target C⋅G to T⋅A in the CEP290 polynucleotide. In any aspect provided herein, or embodiments thereof, the cytidine deaminase domain contains an APOBEC deaminase domain or a derivative thereof. In any aspect provided herein, or embodiments thereof, the APOBEC deaminase domain is selected from one or more of rAPOBEC, ppAPOBEC, RrA3F, AmAPOBEC1, and SsAPOBEC3B. In any aspect provided herein, or embodiments thereof, the APOBEC deaminase domain contains a ppAPOBEC cytidine deaminase domain. In any aspect provided herein, or embodiments thereof, the APOBEC deaminase domain contains a rAPOBEC cytidine deaminase domain. In any aspect provided herein, or embodiments thereof, the APOBEC deaminase domain contains a pRrA3F cytidine deaminase domain. In any aspect provided herein, or embodiments thereof, the APOBEC deaminase domain contains a AmAPOBEC cytidine deaminase domain. In any aspect provided herein, or embodiments thereof, the APOBEC deaminase domain contains a SsAPOBEC cytidine deaminase domain. In any aspect provided herein, or embodiments thereof, the adenosine deaminase domain is TadA deaminase domain. In any aspect provided herein, or embodiments thereof, the adenosine deaminase domain is a TadA*8 or TadA*9 variant. In any aspect provided herein, or embodiments thereof, the base editor is a cytidine adenosine base editor.

[0024] In any aspect provided herein, or embodiments thereof, the method further involves expressing one or more uracil glycosylase inhibitors (UGIs) in the cell. In any aspect provided herein, or embodiments thereof, the UGI is not fused to the base editor. In any aspect provided herein, or embodiments thereof, the UTI is fused to the base editor. In any aspect provided herein, or embodiments thereof, the base editor polypeptide further contains one or more uracil glycosylase inhibitors (UGIs). In any aspect provided herein, or embodiments thereof, the base editor polypeptide further contains two uracil glycosylase inhibitors (UGIs).

[0025] In any aspect provided herein, or embodiments thereof, the base editor polypeptide further contains one or more nuclear localization sequences (NLS).

[0026] In any aspect provided herein, or embodiments thereof, the subject is a mammal. In embodiments, the mammal is a primate. In embodiments, the primate is a human.

[0027] In any aspect provided herein, or embodiments thereof, the subject is less than 10 years old. In any aspect provided herein, or embodiments thereof, the subject is less than 1 year old.

[0028] In any aspect provided herein, or embodiments thereof, the cell is in vivo. In any aspect provided herein, or embodiments thereof, the cell is a mammalian cell. In any aspect provided herein, or embodiments thereof, the cell is a retinal cell. In any aspect provided herein, or embodiments thereof, the cell is a rod cell or a cone cell.

[0029] In any aspect provided herein, or embodiments thereof, the method further involves administering the base editor and/or one or more guide polynucleotides to the subject by subretinal injection or subfoveal injection. In embodiments, the subretinal injection or subfoveal injection results in the formation of a bleb. In embodiments, the bleb has an internal diameter of less than 6 mm. In embodiments, the bleb has an internal diameter of less than 1 mm, 2 mm, 3, mm, 4 mm, or 5 mm.

[0030] In any aspect provided herein, or embodiments thereof, expression and/or function is increased by at least 1, 2, 3, 4, 5, 6, 7, 8, 9, or 10-fold as compared to a control cell without the alteration. In any aspect provided herein, or embodiments thereof, the alteration is associated with an increase in the number of functional CEP290 polypeptides expressed from the CEP290 polypeptide.

[0031] Any aspect provided herein, or embodiments thereof, further involving or containing a polynucleotide encoding one or more uracil glycosylase inhibitors (UGIs). In any aspect provided herein, or embodiments thereof, the base editor polypeptide does not contain the UGI. In any aspect provided herein, or embodiments thereof, the base editor polypeptide contains the UGI.

[0032] In any aspect provided herein, or embodiments thereof, the vector is a viral vector. In any aspect provided herein, or embodiments thereof, the vector targets a cone cell and/or a rod cell.

[0033] In any aspect provided herein, or embodiments thereof, the kit further contains written instructions for the use of the kit in the treatment of Leber congenital amaurosis 10 (LCA10).

[0034] In any aspect provided herein, or embodiments thereof, the method is not a process for modifying the germline genetic identity of human beings.

### Definitions

[0035] Unless defined otherwise, all technical and scientific terms used herein have the meaning commonly understood by a person skilled in the art to which this invention belongs. The following references provide one of skill with a general definition of many of the terms used in this invention: Singleton et al., Dictionary of Microbiology and Molecular Biology (2nd ed. 1994); The Cambridge Dictionary of Science and Technology (Walker ed., 1988); The Glossary of Genetics, 5th Ed., R. Rieger et al. (eds.), Springer Verlag (1991); and Hale & Marham, The Harper Collins Dictionary of Biology (1991). As used herein, the following terms have the meanings ascribed to them below, unless specified otherwise.

[0036] By “Alligator mississippiensis (American alligator) APOBEC1 (AmAPOBEC1) polypeptide” is meant a cytidine deaminase polypeptide with at least about 85% amino acid sequence identity to the exemplary AmAPOBEC1 polypeptide sequence provided below, or a fragment thereof having cytidine deaminase activity.

### Exemplary AmAPOBEC1 Polypeptide Sequence:

(SEQ ID NO: 425)
MADSSEKMRGQYISRDTFEKNYKPIDGTKEAHLLCEIKWGKYGKPWLHW
CQNQRMNIHAEDYFMNNIFKAKKHPVHCYVTWYLSWSPCADCASKIVKF
LEERPYLKLTIYVAQLYYHTEEENRKGLRLLRSKKVIIRVMDISDYNYC
WKVFVSNQNGNEDYWPLQFDPWVKENYSRLLDIFWESKCRSPNPW.

[0037] By “Alligator mississippiensis (American alligator) APOBEC1 (AmAPOBEC1) polynucleotide” is meant a nucleic acid molecule encoding an AmAPOBEC1 polypeptide, as well as the introns, exons, 3′ untranslated regions, 5′ untranslated regions, and regulatory sequences associated with its expression, or fragments thereof. In embodiments, an AmAPOBEC1 polynucleotide is the genomic sequence, cDNA, mRNA, or gene associated with and/or required for AmAPOBEC1 expression. An exemplary AmAPOBEC1 nucleotide sequence is provided below.

### Exemplary AmAPOBEC1 Polynucleotide Sequence:

(SEQ ID NO: 426)
ATGGCCGACAGCTCCGAGAAGATGAGGGGCCAGTACATCAGCCGCGACA
CCTTTGAGAAGAATTATAAGCCCATCGATGGCACAAAGGAGGCCCACCT
GCTGTGCGAGATCAAGTGGGGCAAGTACGGCAAGCCTTGGCTGCACTGG
TGTCAGAATCAGCGGATGAACATCCACGCCGAGGACTATTTCATGAACA
ATATCTTTAAGGCCAAGAAGCACCCTGTGCACTGCTACGTGACCTGGTA
TCTGTCTTGGAGCCCATGCGCCGATTGTGCCTCCAAGATCGTGAAGTTC
CTGGAGGAGCGGCCCTACCTGAAGCTGACCATCTATGTGGCCCAGCTGT
ACTATCACACAGAGGAGGAGAATAGGAAGGGCCTGCGGCTGCTGCGGAG
CAAGAAAGTGATCATCCGCGTGATGGACATCTCCGATTACAACTATTGC
TGGAAGGTGTTCGTGTCTAACCAGAATGGCAACGAGGACTACTGGCCAC
TGCAGTTTGATCCCTGGGTGAAGGAGAATTATTCTCGGCTGCTGGATAT
CTTCTGGGAGTCCAAGTGTAGATCTCCCAACCCTTGG.

[0038] By “Pongo pygmaeus (Orangutan) APOBEC (ppAPOBEC) polypeptide” is meant a cytidine deaminase polypeptide with at least about 85% amino acid sequence identity to the exemplary ppAPOBEC polypeptide sequence provided below, or a fragment thereof having cytidine deaminase activity.

Exemplary ppAPOBEC Polypeptide Sequence:

(SEQ ID NO: 427)
MTSEKGPSTGDPTLRRRIESWEFDVFYDPRELRKETCLLYEIKWGMSRK
IWRSSGKNTTNHVEVNFIKKFTSERRFHSSISCSITWFLSWSPCWECSQ
AIREFLSQHPGVTLVIYVARLFWHMDQRNRQGLRDLVNSGVTIQIMRAS
EYYHCWRNFVNYPPGDEAHWPQYPPLWMMLYALELHCIILSLPPCLKIS
RRWQNHLAFFRLHLQNCHYQTIPPHILLATGLIHPSVTWR.

[0039] By “Pongo pygmaeus (Orangutan) APOBEC (ppAPOBEC) polynucleotide” is meant a nucleic acid molecule encoding an ppAPOBEC polypeptide, as well as the introns, exons, 3′ untranslated regions, 5′ untranslated regions, and regulatory sequences associated with its expression, or fragments thereof. In embodiments, an ppAPOBEC polynucleotide is the genomic sequence, cDNA, mRNA, or gene associated with and/or required for ppAPOBEC expression. An exemplary ppAPOBEC nucleotide sequence is provided below.

Exemplary ppAPOBEC Polynucleotide Sequence:

(SEQ ID NO: 428)
ATGACCTCTGAGAAGGGCCCTAGCACAGGCGACCCCACCCTGCGGCGGA
GAATCGAGAGCTGGGAGTTCGACGTGTTCTACGACCCTAGAGAACTGAG
AAAGGAAACCTGCCTGCTGTACGAGATCAAGTGGGGCATGAGCAGAAAG
ATCTGGCGGAGCTCTGGCAAGAACACCACCAACCACGTGGAAGTGAATT
TCATCAAGAAGTTCACCAGCGAGAGAAGGTTCCACAGCAGCATCAGCTG
CAGCATCACCTGGTTCCTGAGCTGGTCCCCTTGCTGGGAATGCAGCCAG
GCCATCAGAGAGTTCCTGAGCCAACACCCCGGAGTGACACTGGTGATCT
ACGTGGCCAGACTGTTCTGGCACATGGACCAGAGAAACAGACAGGGCCT
GAGAGATCTGGTCAACAGCGGCGTGACTATCCAGATCATGCGGGCCAGC
GAGTACTACCACTGTTGGCGGAACTTCGTGAACTACCCCCCCGGCGATG
AGGCCCACTGGCCTCAGTACCCTCCTCTGTGGATGATGCTGTACGCCCT
GGAACTGCACTGCATCATCCTGTCTCTGCCTCCATGTCTGAAGATCTCT
AGAAGATGGCAGAACCACCTGGCCTTCTTCAGACTGCACCTGCAGAATT
GCCACTACCAGACCATCCCCCCCCACATCCTGCTGGCTACAGGCCTGAT
CCACCCTTCTGTGACCTGGAGA.

[0040] By “rat APOBEC (rAPOBEC) polypeptide” is meant a cytidine deaminase polypeptide with at least about 85% amino acid sequence identity to the exemplary rAPOBEC polypeptide sequence provided below, or a fragment thereof having cytidine deaminase activity.

Exemplary rAPOBEC Polypeptide Sequence:

(SEQ ID NO: 429)
[sequence omitted]

[0041] By “rat APOBEC (rAPOBEC) polynucleotide” is meant a nucleic acid molecule encoding an rAPOBEC polypeptide, as well as the introns, exons, 3′ untranslated regions, 5′ untranslated regions, and regulatory sequences associated with its expression, or fragments thereof. In embodiments, an rAPOBEC polynucleotide is the genomic sequence, cDNA, mRNA, or gene associated with and/or required for rAPOBEC expression. An exemplary rAPOBEC nucleotide sequence is provided below.

Exemplary rAPOBEC Polynucleotide Sequence:

(SEQ ID NO: 430)
ATGAGCAGCGAGACAGGCCCTGTGGCTGTGGATCCTACACTGCGGAGAA
GAATCGAGCCCCACGAGTTCGAGGTGTTCTTCGACCCCAGAGAGCTGCG
GAAAGAGACATGCCTGCTGTACGAGATCAACTGGGGCGGCAGACACTCT
ATCTGGCGGCACACAAGCCAGAACACCAACAAGCACGTGGAAGTGAACT
TTATCGAGAAGTTTACGACCGAGCGGTACTTCTGCCCCAACACCAGATG
CAGCATCACCTGGTTTCTGAGCTGGTCCCCTTGCGGCGAGTGCAGCAGA
GCCATCACCGAGTTTCTGTCCAGATATCCCCACGTGACCCTGTTCATCT
ATATCGCCCGGCTGTACCACCACGCCGATCCTAGAAATAGACAGGGACT
GCGCGACCTGATCAGCAGCGGAGTGACCATCCAGATCATGACCGAGCAA
GAGAGCGGCTACTGCTGGCGGAACTTCGTGAACTACAGCCCCAGCAACG
AAGCCCACTGGCCTAGATATCCTCACCTGTGGGTCCGACTGTACGTGCT
GGAACTGTACTGCATCATCCTGGGCCTGCCTCCATGCCTGAACATCCTG
AGAAGAAAGCAGCCTCAGCTGACCTTCTTCACAATCGCCCTGCAGAGCT
GCCACTACCAGAGACTGCCTCCACACATCCTGTGGGCCACCGGACTTAA
G.

[0042] By “Rhinopithecus roxellana (golden snub-nosed monkey) APOBEC3F (A3F) (RrA3F) polypeptide” is meant a cytidine deaminase polypeptide with at least about 85% amino acid sequence identity to the exemplary RrA3F polypeptide sequence provided below, or a fragment thereof having cytidine deaminase activity.

### Exemplary RrA3F Polypeptide Sequence:

(SEQ ID NO: 431)
MKPQIRDHRPNPMEAMYPHIFYFHFENLEKAYGRNETWLCFTVEIIKQY
LPVPWKKGVFRNQVDPETHCHAEKCFLSWFCNNTLSPKKNYQVTWYTSW
SPCPECAGEVAEFLAEHSNVKLTIYTARLYYFWDTDYQEGLRSLSEEGA
SVEIMDYEDFQYCWENFVYDDGEPFKRWKGLKYNFQSLTRRLREILQ.

[0043] By “Rhinopithecus roxellana (golden snub-nosed monkey) APOBEC3F (A3F) (RrA3F) polynucleotide” is meant a nucleic acid molecule encoding an RrA3F polypeptide, as well as the introns, exons, 3′ untranslated regions, 5′ untranslated regions, and regulatory sequences associated with its expression, or fragments thereof. In embodiments, an RrA3F polynucleotide is the genomic sequence, cDNA, mRNA, or gene associated with and/or required for RrA3F expression. An exemplary RrA3F nucleotide sequence is provided below.

### Exemplary RrA3F Polynucleotide Sequence:

(SEQ ID NO: 432)
ATGAAGCCCCAGATCAGGGACCACCGCCCCAATCCTATGGAGGCCATGT
ACCCTCACATCTTCTATTTTCACTTCGAGAACCTGGAGAAGGCCTACGG
CCGGAATGAGACCTGGCTGTGCTTTACAGTGGAGATCATCAAGCAGTAT
CTGCCAGTGCCCTGGAAGAAGGGCGTGTTCCGGAACCAGGTGGATCCAG
AGACCCACTGCCACGCCGAGAAGTGTTTTCTGTCCTGGTTCTGTAACAA
TACACTGTCTCCCAAGAAGAATTACCAGGTGACCTGGTATACAAGCTGG
TCCCCTTGCCCAGAGTGTGCAGGAGAGGTGGCAGAGTTTCTGGCAGAGC
ACAGCAACGTGAAGCTGACCATCTACACAGCCCGGCTGTACTATTTCTG
GGACACCGATTATCAGGAGGGCCTGAGATCTCTGAGCGAGGAGGGCGCC
TCCGTGGAGATCATGGACTACGAGGATTTTCAGTATTGCTGGGAGAACT
TCGTGTACGACGATGGCGAGCCTTTTAAGAGGTGGAAGGGCCTGAAGTA
TAATTTCCAGTCTCTGACACGGAGACTGCGCGAGATCCTGCAG.

[0044] By “Sus scrofa (pig) APOBEC3B (SsAPOBEC3B) polypeptide” is meant a cytidine deaminase polypeptide with at least about 85% amino acid sequence identity to the exemplary SsAPOBEC3B polypeptide sequence provided below, or a fragment thereof having cytidine deaminase activity.

### Exemplary SsAPOBEC3B Polypeptide Sequence:

(SEQ ID NO: 433)
MDPQRLRQWPGPGPASRGGYGQRPRIRNPEEWFHELSPRTFSFHFRNLR
FASGRNRSYICCQVEGKNCFFQGIFQNQVPPDPPCHAELCFLSWFQSWG
LSPDEHYYVTWFISWSPCCECAAKVAQFLEENRNVSLSLSAARLYYFWK
SESREGLRRLSDLGAQVGIMSFQDFQHCWNNFVHNLGMPFQPWKKLHKN
YQRLVTELKQILREEPATYGSPQAQGKVRIGSTAAGLRHSHSHTRSEAH
LRPNHSSRQHRILNPPREARARTCVLVDASWICYR.

[0045] By “Sus scrofa (pig) APOBEC3B (SsAPOBEC3B) polynucleotide” is meant a nucleic acid molecule encoding an SsAPOBEC3B polypeptide, as well as the introns, exons, 3′ untranslated regions, 5′ untranslated regions, and regulatory sequences associated with its expression, or fragments thereof. In embodiments, an SsAPOBEC3B polynucleotide is the genomic sequence, cDNA, mRNA, or gene associated with and/or required for SsAPOBEC3B expression. An exemplary SsAPOBEC3B nucleotide sequence is provided below.

### Exemplary SsAPOBEC3B Polynucleotide Sequence:

(SEQ ID NO: 434)
ATGGACCCACAGAGGCTGCGCCAGTGGCCCGGCCCTGGCCCAGCAAGCA
GGGGCGGCTACGGCCAGCGGCCAAGAATCAGGAACCCCGAGGAGTGGTT
TCACGAGCTGTCTCCCCGGACCTTCAGCTTTCACTTCCGCAACCTGAGG
TTCGCATCCGGCCGCAATCGGTCTTATATCTGCTGTCAGGTGGAGGGCA
AGAACTGCTTCTTTCAGGGCATCTTTCAGAATCAGGTGCCACCTGACCC
ACCATGCCACGCAGAGCTGTGCTTCCTGTCTTGGTTCCAGAGCTGGGGC
CTGTCCCCCGATGAGCACTACTATGTGACATGGTTTATCTCTTGGAGCC
CTTGCTGTGAGTGTGCCGCCAAGGTGGCCCAGTTCCTGGAGGAGAACCG
CAACGTGAGCCTGTCTCTGAGCGCCGCAAGGCTGTACTATTTCTGGAAG
TCCGAGTCTAGAGAGGGACTGCGGAGACTGAGCGACCTGGGAGCACAAG
TGGGAATCATGTCCTTTCAGGATTTCCAGCACTGCTGGAACAATTTTGT
GCACAACCTGGGCATGCCCTTCCAGCCTTGGAAGAAGCTGCACAAGAAT
TACCAGAGGCTGGTGACCGAGCTGAAGCAGATCCTGCGCGAGGAGCCTG
CCACATATGGCTCTCCACAGGCCCAGGGCAAGGTGAGAATCGGAAGCAC
CGCAGCAGGACTGAGGCACAGCCACTCCCACACACGCTCCGAGGCACAC
CTGAGGCCTAACCACAGCTCCAGACAGCACAGGATCCTGAATCCTCCAC
GGGAGGCCAGAGCCAGGACCTGCGTGCTGGTGGATGCCTCTTGGATCTG
TTACAGA.

[0046] By “adenine” or “9H-Purin-6-amine” is meant a purine nucleobase with the molecular formula C₅H₅N₅, having the structure

[chemical structure]

and corresponding to CAS No. 73-24-5.

[0047] By “adenosine” or “4-Amino-1-[(2R,3R,4S,5R)-3,4-dihydroxy-5-(hydroxymethyl)oxolan-2-yl]pyrimidin-2(1H)-one” is meant an adenine molecule attached to a ribose sugar via a glycosidic bond, having the structure

[chemical structure]

and corresponding to CAS No. 65-46-3. Its molecular formula is C₁₀H₁₃N₅O₄.

[0048] By “adenosine deaminase” or “adenine deaminase” is meant a polypeptide or fragment thereof capable of catalyzing the hydrolytic deamination of adenine or adenosine. In some embodiments, the deaminase or deaminase domain is an adenosine deaminase catalyzing the hydrolytic deamination of adenosine to inosine or deoxy adenosine to deoxyinosine. In some embodiments, the adenosine deaminase catalyzes the hydrolytic deamination of adenine or adenosine in deoxyribonucleic acid (DNA). The adenosine deaminases (e.g., engineered adenosine deaminases, evolved adenosine deaminases) provided herein may be from any organism (e.g., eukaryotic, prokaryotic), including but not limited to algae, bacteria, fungi, plants, invertebrates (e.g., insects), and vertebrates (e.g., amphibians, mammals). In some embodiments, the adenosine deaminase is an adenosine deaminase variant with one or more alterations and is capable of deaminating both adenine and cytosine in a target polynucleotide (e.g., DNA, RNA) and may be referred to as a “dual deaminase”. Non-limiting examples of dual deaminases include those described in PCT/US22/22050. In some embodiments, the target polynucleotide is single or double stranded. In some embodiments, the adenosine deaminase variant is capable of deaminating both adenine and cytosine in DNA. In some embodiments, the adenosine deaminase variant is capable of deaminating both adenine and cytosine in single-stranded DNA. In embodiments, the adenosine deaminase variant is selected from those described in PCT/US2020/018192, PCT/US2020/049975, PCT/US2017/045381, and PCT/US2020/028568, the full contents of which are each incorporated herein by reference in their entireties for all purposes.

[0049] By “adenosine deaminase activity” is meant catalyzing the deamination of adenine or adenosine to guanine in a polynucleotide. In some embodiments, an adenosine deaminase variant as provided herein maintains adenosine deaminase activity (e.g., at least about 30%, 40%, 50%, 60%, 70%, 80%, 90% or more of the activity of a reference adenosine deaminase (e.g., TadA*8.20 or TadA*8.19)).

[0050] By “Adenosine Base Editor (ABE)” is meant a base editor comprising an adenosine deaminase.

[0051] By “Adenosine Base Editor (ABE) polynucleotide” is meant a polynucleotide encoding an ABE. By “Adenosine Base Editor 8 (ABE8) polypeptide” or “ABE8” is meant a base editor as defined herein comprising an adenosine deaminase or adenosine deaminase variant comprising one or more of the alterations listed in Table 5B, one of the combinations of alterations listed in Table 5B, or an alteration at one or more of the amino acid positions listed in Table 5B, such alterations are relative to the following reference sequence:

(SEQ ID NO: 1)
MSEVEFSHEYWMRHALTLAKRARDEREVPVGAVLVLNNRVIGEGWNRAI
GLHDPTAHAEIMALRQGGLVMQNYRLIDATLYVTFEPCVMCAGAMIHSR
IGRVVFGVRNAKTGAAGSLMDVLHYPGMNHRVEITEGILADECAALLCY
FFRMPRQVFNAQKKAQSSTD,

or a corresponding position in another adenosine deaminase. In embodiments, ABE8 comprises alterations at amino acids 82 and/or 166 of SEQ ID NO: 1. In some embodiments, ABE8 comprises further alterations, as described herein, relative to the reference sequence.

[0052] By “Adenosine Base Editor 8 (ABE8) polynucleotide” is meant a polynucleotide encoding an ABE8 polypeptide.

[0053] “Administering” is referred to herein as providing one or more compositions described herein to a patient or a subject. By way of example and without limitation, composition administration, e.g., injection, can be performed by intravenous (i.v.) injection, sub-cutaneous (s.c.) injection, intradermal (i.d.) injection, intraperitoneal (i.p.) injection, or intramuscular (i.m.) injection. One or more such routes can be employed. Parenteral administration can be, for example, by bolus injection or by gradual perfusion over time. In some embodiments, parenteral administration includes infusing or injecting intravascularly, intravenously, intramuscularly, intraarterially, intrathecally, intratumorally, intradermally, intraperitoneally, transtracheally, subcutaneously, subcuticularly, intraarticularly, subcapsularly, subarachnoidly and intrasternally. Alternatively, or concurrently, administration can be by the oral route. In embodiments, one or more compositions described herein are administered by subretinal or subfoveal injection. In some instances, subretinal injection creates a bleb in the fovea.

[0054] By “agent” is meant any small molecule chemical compound, antibody, nucleic acid molecule, or polypeptide, or fragments thereof.

[0055] By “alteration” is meant a change in the level, structure, or activity of an analyte, gene or polypeptide as detected by standard art known methods such as those described herein. As used herein, an alteration includes a change (e.g., increase or decrease) in expression levels. In embodiments, the increase or decrease in expression levels is by 10%, 25%, 40%, 50% or greater. In some embodiments, an alteration includes an insertion, deletion, or substitution of a nucleobase or amino acid (by, e.g., genetic engineering).

[0056] By “ameliorate” is meant decrease, suppress, attenuate, diminish, arrest, or stabilize the development or progression of a disease.

[0057] By “analog” is meant a molecule that is not identical but has analogous functional or structural features. For example, a polypeptide analog retains the biological activity of a corresponding naturally-occurring polypeptide, while having certain biochemical modifications that enhance the analog's function relative to a naturally occurring polypeptide. Such biochemical modifications could increase the analog's protease resistance, membrane permeability, or half-life, without altering, for example, ligand binding. An analog may include an unnatural amino acid.

[0058] By “base editor (BE),” or “nucleobase editor polypeptide (NBE)” is meant an agent that binds a polynucleotide and has nucleobase modifying activity. In various embodiments, the base editor comprises a nucleobase modifying polypeptide (e.g., a deaminase) and a polynucleotide programmable nucleotide binding domain (e.g., Cas9 or Cpf1) in conjunction with a guide polynucleotide (e.g., guide RNA (gRNA)). Representative nucleic acid and protein sequences of base editors include those sequences having about or at least about 85% sequence identity to any base editor sequence provided in the sequence listing, such as those corresponding to SEQ ID NOs: 2-11.

[0059] By “BE4 cytidine deaminase (BE4) polypeptide,” is meant a base editor comprising a nucleic acid programmable DNA binding protein (napDNAbp) domain, a cytidine deaminase domain, and two uracil glycosylase inhibitor domains (UGIs). In embodiments, the napDNAbp is a Cas9n(D10A) polypeptide. Non-limiting examples of cytidine deaminase domains include rAPOBEC, ppAPOBEC, RrA3F, AmAPOBEC1, and SsAPOBEC3B.

[0060] By “BE4 cytidine deaminase (BE4) polynucleotide,” is meant a polynucleotide encoding a BE4 polypeptide.

[0061] By “base editing activity” is meant acting to chemically alter a base within a polynucleotide. In one embodiment, a first base is converted to a second base. In one embodiment, the base editing activity is cytidine deaminase activity, e.g., converting target C⋅G to T⋅A. In another embodiment, the base editing activity is adenosine or adenine deaminase activity, e.g., converting A⋅T to G⋅C.

[0062] The term “base editor system” refers to an intermolecular complex for editing a nucleobase of a target nucleotide sequence. In various embodiments, the base editor (BE) system comprises (1) a polynucleotide programmable nucleotide binding domain, a deaminase domain (e.g., cytidine deaminase or adenosine deaminase) for deaminating nucleobases in the target nucleotide sequence; and (2) one or more guide polynucleotides (e.g., guide RNA) in conjunction with the polynucleotide programmable nucleotide binding domain. In various embodiments, the base editor (BE) system comprises a nucleobase editor domain selected from an adenosine deaminase or a cytidine deaminase, and a domain having nucleic acid sequence specific binding activity. In some embodiments, the base editor system comprises (1) a base editor (BE) comprising a polynucleotide programmable DNA binding domain and a deaminase domain for deaminating one or more nucleobases in a target nucleotide sequence; and (2) one or more guide RNAs in conjunction with the polynucleotide programmable DNA binding domain. In some embodiments, the polynucleotide programmable nucleotide binding domain is a polynucleotide programmable DNA binding domain. In some embodiments, the base editor is a cytidine base editor (CBE). In some embodiments, the base editor is an adenine or adenosine base editor (ABE). In some embodiments, the base editor system (e.g., a base editor system comprising a cytidine deaminase) comprises a uracil glycosylase inhibitor or other agent or peptide (e.g., a uracil stabilizing protein such as provided in WO2022015969, the disclosure of which is incorporated herein by reference in its entirety for all purposes) that inhibits the inosine base excision repair system.

[0063] By “bleb” is meant a small fluid-filled blister. In embodiments, a bleb has an internal diameter of no more than about 10 mm, 9 mm, 8 mm, 7 mm, 6 mm, 5 mm, 4 mm, 3 mm, 2 mm, or 1 mm. In embodiments, a bleb has a maximum internal height of less than about 2 mm, 1 mm, 0.5 mm, 0.25 mm, or 0.1 mm. In embodiments, the internal volume of a bleb is approximately equal to the volume of an amount of a composition of the present invention administered to a patient. In some cases, the internal volume of the bleb is about or at least about 1 μL, 2 μL, 3 μL, 4 μL, 5 μL, 6 μL, 7 μL, 8 μL, 9 μL, 10 μL, 20 μL, 30 μL, 40 μL, 50 μL, 60 μL, 70 μL, 80 μL, 90 μL, 100 μL, 150 μL, 200 μL, 250 μL, 300 μL, 350 μL, 400 μL, 450 μL, or 500 μL. In some cases, the internal volume of the bleb is no more than about 1 μL, 2 μL, 3 μL, 4 μL, 5 μL, 6 μL, 7 μL, 8 μL, 9 μL, 10 μL, 20 μL, 30 μL, 40 μL, 50 μL, 60 μL, 70 μL, 80 μL, 90 μL, 100 μL, 150 μL, 200 μL, 250 μL, 300 μL, 350 μL, 400 μL, 450 μL, or 500 μL.

[0064] The term “Cas9” or “Cas9 domain” refers to an RNA guided nuclease comprising a Cas9 protein, or a fragment thereof (e.g., a protein comprising an active, inactive, or partially active DNA cleavage domain of Cas9, and/or the gRNA binding domain of Cas9). A Cas9 nuclease is also referred to sometimes as a casnl nuclease or a CRISPR (clustered regularly interspaced short palindromic repeat) associated nuclease. By “290-KD centrosomal protein (CEP290) polypeptide” is meant a protein with at least about 85% amino acid sequence identity to Ensembl Accession No. ENST00000552810.6, or a fragment thereof that functions in ciliary assembly and/or ciliary trafficking. An exemplary CEP290 amino acid sequence from Homo sapiens is provided below (Ensembl: ENST00000552810.6; GenBank Accession no: DQ109808.1).

>ENST00000552810.6 peptide: ENSP00000448012 pep: protein_coding
(protein_id = ″AAZ83370.1″)
(SEQ ID NO: 435)
MPPNINWKEIMKVDPDDLPRQEELADNLLISLSKVEVNELKSEKQENVIHLFRITQSLMKMK
AQEVELALEEVEKAGEEQAKFENQLKTKVMKLENELEMAQQSAGGRDTRFLRNEICQLEKQL
EQKDRELEDMEKELEKEKKVNEQLALRNEEAENENSKLRRENKRLKKKNEQLCQDIIDYQKQ
IDSQKETLLSRRGEDSDYRSQLSKKNYELIQYLDEIQTLTEANEKIEVQNQEMRKNLEESVQ
EMEKMTDEYNRMKAIVHQTDNVIDQLKKENDHYQLQVQELTDLLKSKNEEDDPIMVAVNAKV
EEWKLILSSKDDEIIEYQQMLHNLREKLKNAQLDADKSNVMALQQGIQERDSQIKMLTEQVE
QYTKEMEKNTCIIEDLKNELQRNKGASTLSQQTHMKIQSTLDILKEKTKEAERTAELAEADA
REKDKELVEALKRLKDYESGVYGLEDAVVEIKNCKNQIKIRDREIEILTKEINKLELKISDF
LDENEALRERVGLEPKTMIDLTEFRNSKHLKQQQYRAENQILLKEIESLEEERLDLKKKIRQ
MAQERGKRSATSGLTTEDLNLTENISQGDRISERKLDLLSLKNMSEAQSKNEFLSRELIEKE
RDLERSRTVIAKFQNKLKELVEENKQLEEGMKEILQAIKEMQKDPDVKGGETSLIIPSLERL
VNAIESKNAEGIFDASLHLKAQVDQLTGRNEELRQELRESRKEAINYSQQLAKANLKIDHLE
KETSLLRQSEGSNVVFKGIDLPDGIAPSSASIINSQNEYLIHLLQELENKEKKLKNLEDSLE
DYNRKFAVIRHQQSLLYKEYLSEKETWKTESKTIKEEKRKLEDQVQQDAIKVKEYNNLLNAL
QMDSDEMKKILAENSRKITVLQVNEKSLIRQYTTLVELERQLRKENEKQKNELLSMEAEVCE
KIGCLQRFKEMAIFKIAALQKVVDNSVSLSELELANKQYNELTAKYRDILQKDNMLVQRTSN
LEHLECENISLKEQVESINKELEITKEKLHTIEQAWEQETKLGNESSMDKAKKSITNSDIVS
ISKKITMLEMKELNERQRAEHCQKMYEHLRTSLKQMEERNFELETKFAELTKINLDAQKVEQ
MLRDELADSVSKAVSDADRQRILELEKNEMELKVEVSKLREISDIARRQVEILNAQQQSRDK
EVESLRMQLLDYQAQSDEKSLIAKLHQHNVSLQLSEATALGKLESITSKLQKMEAYNLRLEQ
KLDEKEQALYYARLEGRNRAKHLRQTIQSLRRQFSGALPLAQQEKFSKTMIQLQNDKLKIMQ
EMKNSQQEHRNMENKTLEMELKLKGLEELISTLKDTKGAQKVINWHMKIEELRLQELKLNRE
LVKDKEEIKYLNNIISEYERTISSLEEEIVQQNKFHEERQMAWDQREVDLERQLDIFDRQQN
EILNAAQKFEEATGSIPDPSLPLPNQLEIALRKIKENIRIILETRATCKSLEEKLKEKESAL
RLAEQNILSRDKVINELRLRLPATAEREKLIAELGRKEMEPKSHHTLKIAHQTIANMQARLN
QKEEVLKKYQRLLEKAREEQREIVKKHEEDLHILHHRLELQADSSLNKFKQTAWDLMKQSPT
PVPTNKHFIRLAEMEQTVAEQDDSLSSLLVKLKKVSQDLERQREITELKVKEFENIKLQLQE
NHEDEVKKVKAEVEDLKYLLDQSQKESQCLKSELQAQKEANSRAPTTTMRNLVERLKSQLAL
KEKQQKALSRALLELRAEMTAAAEERIISATSQKEAHLNVQQIVDRHTRELKTQVEDLNENL
LKLKEALKTSKNRENSLTDNLNDLNNELQKKQKAYNKILREKEEIDQENDELKRQIKRLTSG
LQGKPLTDNKQSLIEELQRKVKKLENQLEGKVEEVDLKPMKEKNAKEELIRWEEGKKWQAKI
EGIRNKLKEKEGEVFTLTKQLNTLKDLFAKADKEKLTLQRKLKTTGMTVDQVLGIRALESEK
ELEELKKRNLDLENDILYMRAHQALPRDSVVEDLHLQNRYLQEKLHALEKQFSKDTYSKPSI
SGIESDDHCQREQELQKENLKLSSENIELKFQLEQANKDLPRLKNQVRDLKEMCEFLKKEKA
EVQRKLGHVRGSGRSGKTIPELEKTIGLMKKVVEKVQRENEQLKKASGILTSEKMANIEQEN
EKLKAELEKLKAHLGHQLSMHYESKTKGTEKIIAENERLRKELKKETDAAEKLRIAKNNLEI
LNEKMTVQLEETGKRLQFAESRGPQLEGADSKSWKSIVVTRMYETKLKELETDIAKKNQSIT
DLKQLVKEATEREQKVNKYNEDLEQQIKILKHVPEGAETEQGLKRELQVLRLANHQLDKEKA
ELIHQIEANKDQSGAESTIPDADQLKEKIKDLETQLKMSDLEKQHLKEEIKKLKKELENFDP
SFFEEIEDLKYNYKEEVKKNILLEEKVKKLSEQLGVELTSPVAASEEFEDEEESPVNFPIY.

[0065] By “290-KD centrosomal protein (CEP290) polynucleotide” is meant a nucleic acid molecule encoding an CEP290 polypeptide, as well as the introns, exons, 3′ untranslated regions, 5′ untranslated regions, and regulatory sequences associated with its expression, or fragments thereof. In embodiments, an CEP290 polynucleotide is the genomic sequence, cDNA, mRNA, or gene associated with and/or required for CEP290 expression. Exemplary CEP290 nucleotide sequences from Homo sapiens are provided below and at SEQ ID NO: 437 (corresponding to Ensembl Accession Nos.: ENST00000552810.6 and ENSG00000198707), where nucleotides in exons are in bold text, nucleotides in introns are in plain text, and the nucleotide c.2991+1655A is indicated by a bold double-underlined “A” (A). In the notation c.2991+1655A, “c.2991” indicates coding nucleotide number 2991 in a CEP290 polynucleotide sequence and “+1655A” indicates an adenosine at nucleotide position 1655 of the intron of the CEP290 polynucleotide sequence immediately following coding nucleotide number 2991.

>ENST00000552810.6 cds: protein_coding
(SEQ ID NO: 436)
ATGCCACCTAATATAAACTGGAAAGAAATAATGAAAGTTGACCCAGATGACCTGCCCCGTCA
AGAAGAACTGGCAGATAATTTATTGATTTCCTTATCCAAGGTGGAAGTAAATGAGCTAAAAA
GTGAAAAGCAAGAAAATGTGATACACCTTTTCAGAATTACTCAGTCACTAATGAAGATGAAA
GCTCAAGAAGTGGAGCTGGCTTTGGAAGAAGTAGAAAAAGCTGGAGAAGAACAAGCAAAATT
TGAAAATCAATTAAAAACTAAAGTAATGAAACTGGAAAATGAACTGGAGATGGCTCAGCAGT
CTGCAGGTGGACGAGATACTCGGTTTTTACGTAATGAAATTTGCCAACTTGAAAAACAATTA
GAACAAAAAGATAGAGAATTGGAGGACATGGAAAAGGAGTTGGAGAAAGAGAAGAAAGTTAA
TGAGCAATTGGCTCTTCGAAATGAGGAGGCAGAAAATGAAAACAGCAAATTAAGAAGAGAGA
ACAAACGTCTAAAGAAAAAGAATGAACAACTTTGTCAGGATATTATTGACTACCAGAAACAA
ATAGATTCACAGAAAGAAACACTTTTATCAAGAAGAGGGGAAGACAGTGACTACCGATCACA
GTTGTCTAAAAAAAACTATGAGCTTATCCAATATCTTGATGAAATTCAGACTTTAACAGAAG
CTAATGAGAAAATTGAAGTTCAGAATCAAGAAATGAGAAAAAATTTAGAAGAGTCTGTACAG
GAAATGGAGAAGATGACTGATGAATATAATAGAATGAAAGCTATTGTGCATCAGACAGATAA
TGTAATAGATCAGTTAAAAAAAGAAAACGATCATTATCAACTTCAAGTGCAGGAGCTTACAG
ATCTTCTGAAATCAAAAAATGAAGAAGATGATCCAATTATGGTAGCTGTCAATGCAAAAGTA
GAAGAATGGAAGCTAATTTTGTCTTCTAAAGATGATGAAATTATTGAGTATCAGCAAATGTT
ACATAACCTAAGGGAGAAACTTAAGAATGCTCAGCTTGATGCTGATAAAAGTAATGTTATGG
CTCTACAGCAGGGTATACAGGAACGAGACAGTCAAATTAAGATGCTCACCGAACAAGTAGAA
CAATATACAAAAGAAATGGAAAAGAATACTTGTATTATTGAAGATTTGAAAAATGAGCTCCA
AAGAAACAAAGGTGCTTCAACCCTTTCTCAACAGACTCATATGAAAATTCAGTCAACGTTAG
ACATTTTAAAAGAGAAAACTAAAGAGGCTGAGAGAACAGCTGAACTGGCTGAGGCTGATGCT
AGGGAAAAGGATAAAGAATTAGTTGAGGCTCTGAAGAGGTTAAAAGATTATGAATCGGGAGT
ATATGGTTTAGAAGATGCTGTCGTTGAAATAAAGAATTGTAAAAACCAAATTAAAATAAGAG
ATCGAGAGATTGAAATATTAACAAAGGAAATCAATAAACTTGAATTGAAGATCAGTGATTTC
CTTGATGAAAATGAGGCACTTAGAGAGCGTGTGGGCCTTGAACCAAAGACAATGATTGATTT
AACTGAATTTAGAAATAGCAAACACTTAAAACAGCAGCAGTACAGAGCTGAAAACCAGATTC
TTTTGAAAGAGATTGAAAGTCTAGAGGAAGAACGACTTGATCTGAAAAAAAAAATTCGTCAA
ATGGCTCAAGAAAGAGGAAAAAGAAGTGCAACTTCAGGATTAACCACTGAGGACCTGAACCT
AACTGAAAACATTTCTCAAGGAGATAGAATAAGTGAAAGAAAATTGGATTTATTGAGCCTCA
AAAATATGAGTGAAGCACAATCAAAGAATGAATTTCTTTCAAGAGAACTAATTGAAAAAGAA
AGAGATTTAGAAAGGAGTAGGACAGTGATAGCCAAATTTCAGAATAAATTAAAAGAATTAGT
TGAAGAAAATAAGCAACTTGAAGAAGGTATGAAAGAAATATTGCAAGCAATTAAGGAAATGC
AGAAAGATCCTGATGTTAAAGGAGGAGAAACATCTCTAATTATCCCTAGCCTTGAAAGACTA
GTTAATGCTATAGAATCAAAGAATGCAGAAGGAATCTTTGATGCGAGTCTGCATTTGAAAGC
CCAAGTTGATCAGCTTACCGGAAGAAATGAAGAATTAAGACAGGAGCTCAGGGAATCTCGGA
AAGAGGCTATAAATTATTCACAGCAGTTGGCAAAAGCTAATTTAAAGATAGACCATCTTGAA
AAAGAAACTAGTCTTTTACGACAATCAGAAGGATCAAATGTTGTTTTTAAAGGAATTGACTT
ACCTGATGGGATAGCACCATCTAGTGCCAGTATCATTAATTCTCAGAATGAATATTTAATAC
ATTTGTTACAGGAACTAGAAAATAAAGAAAAAAAGTTAAAGAATTTAGAAGATTCTCTTGAA
GATTACAACAGAAAATTTGCTGTAATTCGTCATCAACAAAGTTTGTTGTATAAAGAATACCT
AAGTGAAAAGGAGACCTGGAAAACAGAATCTAAAACAATAAAAGAGGAAAAGAGAAAACTTG
AGGATCAAGTCCAACAAGATGCTATAAAAGTAAAAGAATATAATAATTTGCTCAATGCTCTT
CAGATGGATTCGGATGAAATGAAAAAAATACTTGCAGAAAATAGTAGGAAAATTACTGTTTT
GCAAGTGAATGAAAAATCACTTATAAGGCAATATACAACCTTAGTAGAATTGGAGCGACAAC
TTAGAAAAGAAAATGAGAAGCAAAAGAATGAATTGTTGTCAATGGAGGCTGAAGTTTGTGAA
AAAATTGGGTGTTTGCAAAGATTTAAGGAAATGGCCATTTTCAAGATTGCAGCTCTCCAAAA
AGTTGTAGATAATAGTGTTTCTTTGTCTGAACTAGAACTGGCTAATAAACAGTACAATGAAC
TGACTGCTAAGTACAGGGACATCTTGCAAAAAGATAATATGCTTGTTCAAAGAACAAGTAAC
TTGGAACACCTGGAGTGTGAAAACATCTCCTTAAAAGAACAAGTGGAGTCTATAAATAAAGA
ACTGGAGATTACCAAGGAAAAACTTCACACTATTGAACAAGCCTGGGAACAGGAAACTAAAT
TAGGTAATGAATCTAGCATGGATAAGGCAAAGAAATCAATAACCAACAGTGACATTGTTTCC
ATTTCAAAAAAAATAACTATGCTGGAAATGAAGGAATTAAATGAAAGGCAGCGGGCTGAACA
TTGTCAAAAAATGTATGAACACTTACGGACTTCGTTAAAGCAAATGGAGGAACGTAATTTTG
AATTGGAAACCAAATTTGCTGAGCTTACCAAAATCAATTTGGATGCACAGAAGGTGGAACAG
ATGTTAAGAGATGAATTAGCTGATAGTGTGAGCAAGGCAGTAAGTGATGCTGATAGGCAACG
GATTCTAGAATTAGAGAAGAATGAAATGGAACTAAAAGTTGAAGTGTCAAAACTGAGAGAGA
TTTCTGATATTGCCAGAAGACAAGTTGAAATTTTGAATGCACAACAACAATCTAGGGACAAG
GAAGTAGAGTCCCTCAGAATGCAACTGCTAGACTATCAGGCACAGTCTGATGAAAAGTCGCT
CATTGCCAAGTTGCACCAACATAATGTCTCTCTTCAACTGAGTGAGGCTACTGCTCTTGGTA
AGTTGGAGTCAATTACATCTAAACTGCAGAAGATGGAGGCCTACAACTTGCGCTTAGAGCAG
AAACTTGATGAAAAAGAACAGGCTCTCTATTATGCTCGTTTGGAGGGAAGAAACAGAGCAAA
ACATCTGCGCCAAACAATTCAGTCTCTACGACGACAGTTTAGTGGAGCTTTACCCTTGGCAC
AACAGGAAAAGTTCTCCAAAACAATGATTCAACTACAAAATGACAAACTTAAGATAATGCAA
GAAATGAAAAATTCTCAACAAGAACATAGAAATATGGAGAACAAAACATTGGAGATGGAATT
AAAATTAAAGGGCCTGGAAGAGTTAATAAGCACTTTAAAGGATACCAAAGGAGCCCAAAAGG
TAATCAACTGGCATATGAAAATAGAAGAACTTCGTCTTCAAGAACTTAAACTAAATCGGGAA
TTAGTCAAGGATAAAGAAGAAATAAAATATTTGAATAACATAATTTCTGAATATGAACGTAC
AATCAGCAGTCTTGAAGAAGAAATTGTGCAACAGAACAAGTTTCATGAAGAAAGACAAATGG
CCTGGGATCAAAGAGAAGTTGACCTGGAACGCCAACTAGACATTTTTGACCGTCAGCAAAAT
GAAATACTAAATGCGGCACAAAAGTTTGAAGAAGCTACAGGATCAATCCCTGACCCTAGTTT
GCCCCTTCCAAATCAACTTGAGATCGCTCTAAGGAAAATTAAGGAGAACATTCGAATAATTC
TAGAAACACGGGCAACTTGCAAATCACTAGAAGAGAAACTAAAAGAGAAAGAATCTGCTTTA
AGGTTAGCAGAACAAAATATACTGTCAAGAGACAAAGTAATCAATGAACTGAGGCTTCGATT
GCCTGCCACTGCAGAAAGAGAAAAGCTCATAGCTGAGCTAGGCAGAAAAGAGATGGAACCAA
AATCTCACCACACATTGAAAATTGCTCATCAAACCATTGCAAACATGCAAGCAAGGTTAAAT
CAAAAAGAAGAAGTATTAAAGAAGTATCAACGTCTTCTAGAAAAAGCCAGAGAGGAGCAAAG
AGAAATTGTGAAGAAACATGAGGAAGACCTTCATATTCTTCATCACAGATTAGAACTACAGG
CTGATAGTTCACTAAATAAATTCAAACAAACGGCTTGGGATTTAATGAAACAGTCTCCCACT
CCAGTTCCTACCAACAAGCATTTTATTCGTCTGGCTGAGATGGAACAGACAGTAGCAGAACA
AGATGACTCTCTTTCCTCACTCTTGGTCAAACTAAAGAAAGTATCACAAGATTTGGAGAGAC
AAAGAGAAATCACTGAATTAAAAGTAAAAGAATTTGAAAATATCAAATTACAGCTTCAAGAA
AACCATGAAGATGAAGTGAAAAAAGTAAAAGCGGAAGTAGAGGATTTAAAGTATCTTCTGGA
CCAGTCACAAAAGGAGTCACAGTGTTTAAAATCTGAACTTCAGGCTCAAAAAGAAGCAAATT
CAAGAGCTCCAACAACTACAATGAGAAATCTAGTAGAACGGCTAAAGAGCCAATTAGCCTTG
AAGGAGAAACAACAGAAAGCACTTAGTCGGGCACTTTTAGAACTCCGGGCAGAAATGACAGC
AGCTGCTGAAGAACGTATTATTTCTGCAACTTCTCAAAAAGAGGCCCATCTCAATGTTCAAC
AAATCGTTGATCGACATACTAGAGAGCTAAAGACACAAGTTGAAGATTTAAATGAAAATCTT
TTAAAATTGAAAGAAGCACTTAAAACAAGTAAAAACAGAGAAAACTCACTAACTGATAATTT
GAATGACTTAAATAATGAACTGCAAAAGAAACAAAAAGCCTATAATAAAATACTTAGAGAGA
AAGAGGAAATTGATCAAGAGAATGATGAACTGAAAAGGCAAATTAAAAGACTAACCAGTGGA
TTACAGGGCAAACCCCTGACAGATAATAAACAAAGTCTAATTGAAGAACTCCAAAGGAAAGT
TAAAAAACTAGAGAACCAATTAGAGGGAAAGGTGGAGGAAGTAGACCTAAAACCTATGAAAG
AAAAGAATGCTAAAGAAGAATTAATTAGGTGGGAAGAAGGTAAAAAGTGGCAAGCCAAAATA
GAAGGAATTCGAAACAAGTTAAAAGAGAAAGAGGGGGAAGTCTTTACTTTAACAAAGCAGTT
GAATACTTTGAAGGATCTTTTTGCCAAAGCCGATAAAGAGAAACTTACTTTGCAGAGGAAAC
TAAAAACAACTGGCATGACTGTTGATCAGGTTTTGGGAATACGAGCTTTGGAGTCAGAAAAA
GAATTGGAAGAATTAAAAAAGAGAAATCTTGACTTAGAAAATGATATATTGTATATGAGGGC
CCACCAAGCTCTTCCTCGAGATTCTGTTGTAGAAGATTTACATTTACAAAATAGATACCTCC
AAGAAAAACTTCATGCTTTAGAAAAACAGTTTTCAAAGGATACATATTCTAAGCCTTCAATT
TCAGGAATAGAGTCAGATGATCATTGTCAGAGAGAACAGGAGCTTCAGAAGGAAAACTTGAA
GTTGTCATCTGAAAATATTGAACTGAAATTTCAGCTTGAACAAGCAAATAAAGATTTGCCAA
GATTAAAGAATCAAGTCAGAGATTTGAAGGAAATGTGTGAATTTCTTAAGAAAGAAAAAGCA
GAAGTTCAGCGGAAACTTGGCCATGTTAGAGGGTCTGGTAGAAGTGGAAAGACAATCCCAGA
ACTGGAAAAAACCATTGGTTTAATGAAAAAAGTAGTTGAAAAAGTCCAGAGAGAAAATGAAC
AGTTGAAAAAAGCATCAGGAATATTGACTAGTGAAAAAATGGCTAATATTGAGCAGGAAAAT
GAAAAATTGAAGGCTGAATTAGAAAAACTTAAAGCTCATCTTGGGCATCAGTTGAGCATGCA
CTATGAATCCAAGACCAAAGGCACAGAAAAAATTATTGCTGAAAATGAAAGGCTTCGTAAAG
AACTTAAAAAAGAAACTGATGCTGCAGAGAAATTACGGATAGCAAAGAATAATTTAGAGATA
TTAAATGAGAAGATGACAGTTCAACTAGAAGAGACTGGTAAGAGATTGCAGTTTGCAGAAAG
CAGAGGTCCACAGCTTGAAGGTGCTGACAGTAAGAGCTGGAAATCCATTGTGGTTACAAGAA
TGTATGAAACCAAGTTAAAAGAATTGGAAACTGATATTGCCAAAAAAAATCAAAGCATTACT
GACCTTAAACAGCTTGTAAAAGAAGCAACAGAGAGAGAACAAAAAGTTAACAAATACAATGA
AGACCTTGAACAACAGATTAAGATTCTTAAACATGTTCCTGAAGGTGCTGAGACAGAGCAAG
GCCTTAAACGGGAGCTTCAAGTTCTTAGATTAGCTAATCATCAGCTGGATAAAGAGAAAGCA
GAATTAATCCATCAGATAGAAGCTAACAAGGACCAAAGTGGAGCTGAAAGCACCATACCTGA
TGCTGATCAACTAAAGGAAAAAATAAAAGATCTAGAGACACAGCTCAAAATGTCAGATCTAG
AAAAGCAGCATTTGAAGGAGGAAATAAAGAAGCTGAAAAAAGAACTGGAAAATTTTGATCCT
TCATTTTTTGAAGAAATTGAAGATCTTAAGTATAATTACAAGGAAGAAGTGAAGAAGAATAT
TCTCTTAGAAGAGAAGGTAAAAAAACTTTCAGAACAATTGGGAGTTGAATTAACTAGCCCTG
TTGCTGCTTCTGAAGAGTTTGAAGATGAAGAAGAAAGTCCTGTTAATTTCCCCATTTACTAA.
>Portion of 12 dna: chromosome chromosome: GRCh38:12:88049016:88142088: −1
that contains the nucleotide c.2991 + 1655A (indicated by bold, double-
underline text)
(SEQ ID NO: 513)
GAAATGGCCATTTTCAAGATTGCAGCTCTCCAAAAAGTTGTAGATAATAGTGTTTCTTTGTC
TGAACTAGAACTGGCTAATAAACAGTACAATGAACTGACTGCTAAGTACAGGGACATCTTGC
AAAAAGATAATATGCTTGTTCAAAGAACAAGTAACTTGGAACACCTGGAGGTAAGTTTGTGT
GATTCTTGAACCTTGTGAAATTAGCCATTTTTCTTCAATATTTTTGTGTTTGGGGGGATTTG
GCAGATTTTAATTAAAGTTTGCCTGCATTTATATAAATTTAACAGAGATATAATTATCCATA
TTATTCATTCAGTTTAGTTATAAATATTTTGTTCCCACATAACACACACACACACACACAAT
ATATTATCTATTTATAGTGGCTGAATGACTTCTGAATGATTATCTAGATCATTCTCCTTAGG
TCACTTGCATGATTTAGCTGAATCAAACCTCTTTTAACCAGACATCTAAGAGAAAAAGGAGC
ATGAAACAGGTAGAATATTGTAATCAAAGGAGGGAAGCACTCATTAAGTGCCCATCCCTTTC
TCTTACCCCTGTACCCAGAACAAACTATTCTCCCATGGTCCCTGGCTTTTGTTCCTTGGAAT
GGATGTAGCCAACAGTAGCTGAAATATTAAGGGCTCTTCCTGGACCATGGATGCACTCTGTA
AATTCTCATCATTTTTTATTGTAGAATAAATGTAGAATTTTAATGTAGAATAAATTTATTTA
ATGTAGAATAAAAAATAAAAAAACTAGAGTAGAATATCATAAGTTACAATCTGTGAATATGG
ACCAGACCCTTTGTAGTTATCTTACAGCCACTTGAACTCTATACCTTTTACTGAGGACAGAA
CAAGCTCCTGATTTGTTCATCTTCCTCATCAGAAATAGAGGCTTATGGATTTTGGATTATTC
TTATCTAAGATCCTTTCACAGGAGTAGAATAAGATCTAATTCTATTAGCTCAAAAGCTTTTG
CTGGCTCATAGAGACACATTCAGTAAATGAAAACGTTGTTCTGAGTAGCTTTCAGGATTCCT
ACTAAATTATGAGTCATGTTTATCAATATTATTTAGAAGTAATCATAATCAGTTTGCTTTCT
GCTGCTTTTGCCAAAGAGAGGTGATTATGTTACTTTTTATAGAAAATTATGCCTATTTAGTG
TGGTGATAATTTATTTTTTTCCATTCTCCATGTCCTCTGTCCTATCCTCTCCAGCATTAGAA
AGTCCTAGGCAAGAGACATCTTGTGGATAATGTATCAATGAGTGATGTTTAACGTTATCATT
TTCCCAAAGAGTATTTTTCATCTTTCCTAAAGATTTTTTTTTTTTTTTTTTGAGATGGAGTT
TCATTCTGTCACCCAGGCTGAGTGCAGTGGCACGATCTCGGCTTAACGCTTACTGCATCCTC
TGCCTCCCAGATTCAAGCAGTTCTCCTGCCTCAGCCTCTGAGTAGCTGGGATTACAGGTGTG
CACCACCACACCAGCTAATTTTTTTTTTTTTTTTTTTTTTTTTGAGGCAGAGTCTCGCTCTG
TCACCCAGGCTGGAGTGCAGTGGCGCCATCTTGGCTCACTGCAAGCTCCACCTCCCGGGTTC
AGGCCGTTCTCCTGCCTCAGCCTCCTGAGTAGCTGGTACCACAGGCACCCACCATCATGCCC
GGCTAATTTTTTGTATTTTTAGTAGAGATGGGGTTTCACCTTGTTAGCCAGGATGGTGTCGA
TCTCCTGAACTCGTGATCCACCCGCCTCGGCCTCCTAAAGTGCTGGGATTACAGATGTGAGC
CACCGCACCTGGCCCCAGTTGTAATTGTGAATATCTCATACCTATCCCTATTGGCAGTGTCT
TAGTTTTATTTTTTATTATCTTTATTGTGGCAGCCATTATTCCTGTCTCTATCTCCAGTCTT
ACATCCTCCTTACTGCCACAAGAATGATCATTCTAAACATGAATCCTACCCTGTGACTCCCA
TGTGACTCCCCGCCTTAAAAACTGTCAAAAGCTACCGGTTACCTGAAGGGTAAAAGTCAAGT
CCCCTACTTACCTCATGTCATCTAGAGCAAGAGATGAACTAGCTGAGTTTTCTGACCACAGT
GTTCTTTCTTATGTATGTTCTTTTGTACGTGCTCTTTTCTATATATAGGGAACCATTTCTCT
CTTCCAGTTGTTTTGCTCAGTGAATTTCTATTCCTGTTTCAAAACTTGTTCAGGCATTACCT
TTTTTTTCTTAAGCATACTTTTTTTAATGGAACAAAGTCACTCCTGTCTACACTAGTTCTGC
ATCTTATACATAGGTTTTGTACATAGTACATATTTATATCACATCAAATTATATGTGTTTAC
ATATCTGTCTTCCTTAATGGAATATAAGTCTTTTGATATAAGGAACTATTTAATTTGTTTCT
GTGTGTTGAGTATCTCCTGTTTGGCACAGAGTTCAAGCTAATACATGAGAGTGATTAGTGGT
GGAGAGCCACAGTGCATGTGGTGTCAAATATGGTGCTTAGGAAATTATTGTTGCTTTTTGAG
AGGTAAAGGTTCATGAGACTAGAGGTCACGAAAATCAGATTTCATGTGTGAAGAATGGAATA
GATAATAAGGAAATACAAAAACTGGATGGGTAATAAAGCAAAAGAAAAACTTGAAATTTGAT
AGTAGAAGAAAAAAGAAATAGATGTAGATTGAGGTAGAATCAAGAAGAGGATTCTTTTTTTG
TTGTTTTTTTTTTTGAAACAGAGTCTCACTGTGTTGCCCAGGCTGGAGTGCAGTGGAGTGAT
CTTGGCTTACTGCAACCTCTGCCTCCCAGGTTCAAGCGATTCTTCTGCTTCAGTCTCCCGAG
TAGCTGGAATTACAGGTGCCCACCAGCACGGCCGGCTAATTTAGTAGAGACAGGGTTTTGCC
ATGTTGGCCGGGCTGGTCTCAAACTTTGGATCTCAGGTAATCCGCCAGCCTCAACTTCCCAA
AGTGCTGGGATTACAGGCATGAGCCACTGTGCCCAGCCTGTTTTTTTTTTTTTAAAGGAGAC
CAGTGAAGTTTCAGGAGGAGGGAAAGAAAATTTAGAGTTACTAGGGAGAGAGTGATGAAGAT
AAGAGATGAAAGTGGTAATAAGGGAAATAGCAAAATATCAGGGTAGGTGGGAGAAAAAGAGA
TTTGTAACAAACAATAGGATTATCCTGTGAAAAAGGATGAAAGGAAGAAAAAAATGGATAGA
AAGATATTTAAAACACCCTCAGCCTCCTGTTTTCCCTCCTGTGTATTCATAGTATATAAAAC
TATAATTATGTACTTTACTTAAAAAATATATTATTATTACCTTATCGTGCTTATTTAATCAT
AGCATGTCCTCTTTTTAGTCTCATTACCCTGTTTGTATTATTCTTCATAACACTTAATACCT
GACATTGTATTATATATTGGCTTATTTTCCAGGTACTCCACTCAAATATAAGTTCTAGGATA
TAATTTATTTATCACTGAAATCCATTGCTTAGAGTACCTGGCATGTAGTAAATAGGCATTCT
GTTTTTTCAAATAAAAAATAAAGGAACTTAAGATATATATTTATGTTATATCGCCAGCCTTT
TTCCTCACAGCTCTATTCTGTTGTACAGAATTACCTACTTTACAATTCCTGTGTTTCAAGGG
GATCTCAAATTTAACGTGTCCACAATGAACTCCTGATTTCTGTTTCTCTCCTAGTCATTCTT
ATTTCAATATATGTTCAGTTACCTAACCAGCTAGTCAAGGCAGATACTTTAGAGTTATTCTG
TAGTCATTCTTTTTCCCTACCATTTTTGTTTTCCAAATGTAATTTATGTGTGTCTTCTTCAT
CCTCGCAGCTCTAACCCTTGTCCAAACCAGCATCATCACTCATCTGGAGTTCCACAATGTCT
TTCTGGCTAGTTTCCCTGATTTCTCTATTGACCCCTTTATTCTCCACAGTGCAGCCAGAATG
ATTGTTTAAAACTTCCTCCTTAAAATCTTTAAATTGTTTTCTTTTATACGTTAAGTTAAATT
CCAGTTCCTTGTCTTGGCATGCCATGCCCTGCCTGGTGTGGCCCCTGATGGTCTCTCCAACT
TCATGTTTTACTACTATTGACTCTTATTTTTGCTTACTCTGCTTGGGTGCTCCAGTCCTCCA
AATCATTTCCTGCTCCAATCATTTCAATCATTTTTTCCTCTCAGATCTTATAGTATTCCAAA
TGCTTTCTTCCTTTGGAGCATCTGGGTTTACTAATAAATACTTCGTACCTCACAGTTCAGCT
TAAATATCAATTATTTGGTGGTTAAGACATCCTTCAACCGCTCTATCTAAATGTTCCTTTCT
ATTATTCACTGGCTCAGTACTCTGTTTTTATTTTCTTTCTAAATGTCAACTTTTTTTTTTTT
GAGTCAGGGTCTCACTGTTGCCCAGGCTCGAGTGCAGTTGCACAATCATAGCTCATTGCAGC
CTTGCCCTCCTGGGATCAAGTAATTCTCCCACCTCAGCCTCCAAAATAGCTGGGATTACAGG
TATGCATCACCATGCTCAGCTAATTTTTTGTGTTTTTTTGTAGAGATGAGGTCTCACTTTGT
TGCCCAGGCTGGTCTCAAACTCCTGGACTCAAGTGATTCTCCCACCTCAGCCTCCCAAAGTG
CTGGGGTTACAGGTGTGAGCCACTGCACCTGGTCGATACTGACTTTTTTTTTTTTTTGAGAT
GGAGTTTTGCTCTGTTGCCCAGGCTAGAGCGCAGTGGTGTGATCTCAGCTCACTGCAACCTC
CACCTCCCAGGTTAAAGGGATTCTTCTGCCTCAGTCTCCTGAGTAGCTGGGATTACAGGCAA
GTGCCATCATGACTGGCTAATTTTTGTATTTTTAGCACTATGTTTAGTACTGTGTTGGCCAG
GCTTGTCTCGAACTCCTGACCTCAAGTGATCCACCCACCTCAGCCTCCCAAAGTGCTGGGAT
TACAGGTGTGAGCCACCGTAATCGGCCAACATTGACATTTTTAGTAGACTTTTTGTTTGTTT
ACTTGCTTATTATCTGCTGCCTTCCACACTCTGGCGAAATCCTGCCACCCACCCACACACAC
ATAGGCACTGAATGGGCAGAACTCTGAAGGCCAGAATTTTATATTTCTTTTCACTGTAAACA
TCATCATCTGTCACTGATGGCACACTAGGATGCTCAGCAACTGTGTGCATGAAGGAAGTAAG
CACTAGTTTGTGAAGGCTGCAAAACTCTTGAGTATTCTAAGAGTTTTGGCCAAAATGAATGT
ACAGCTTTAGTGGCAGAAGCTAATACTCAGAAATTGAGGCCGTATATTGGATAACACAGGAT
TTGGATGATTATTTTAAAATAATATTTTACATTGTATATATGTGTGTGTGTGTGTGTGTGTG
TGTGTGTATGTGTGTGTGTGTGTATATATATATGTATGTATGTGTATTAGTCCGTTCTCATG
CTGCTATGAAGAAATACCTGAGACTGGGTAATTTATAAAGGAAAGAGGTTTAATTGACTCAC
AGTTCCACAGAGCTGGGGAGGCCTCAGAAAACTTAACAGTTATGGCAGAAGGGGAAGCAAAC
ACATTTTTCTTCACATGGTGGCCGGAATTAGAAGAATGTGAGCCGAGCAAAGGGGAAAGCCC
CTTATAAAACCATCAGACATCGTGAGAACTTACTATTATGAGAATAGCGTGGGGGAAACCAC
CCCCACGATTCAATTACCTCCCACCAAATCCCTCCCATGACATATGAGGATTATGGGAACTA
TGATTCAAGATGAGATTTGGGTAGGGACACAGCCAAACCATATCAGTATGTATATGTATACA
AGTATTATATATATATGTATGTGTTTGTATGCATACATGTATTATATATGGAGGAAATTCTA
ATTTTGTAAAAAACTGGATTGTGAGTTTTAAGGAGATGTTATATAAAGTTAAGACAATGTCA
TTTTGTGGTATTGGTCTGAATTACAATGTAGTTTCTTAGTGATATTTTTCCTTTATTCAGTG
TGAAAACATCTCCTTAAAAGAACAAGTGGAGTCTATAAATAAAGAACTGGAGATTACCAAGG
AAAAACTTCACACTATTGAACAAGCCTGGGAACAGGAAACTAAATTAG.

[0066] The term “conservative amino acid substitution” or “conservative mutation” refers to the replacement of one amino acid by another amino acid with a common property. A functional way to define common properties between individual amino acids is to analyze the normalized frequencies of amino acid changes between corresponding proteins of homologous organisms (Schulz, G. E. and Schirmer, R. H., Principles of Protein Structure, 30 Springer-Verlag, New York (1979)). According to such analyses, groups of amino acids can be defined where amino acids within a group exchange preferentially with each other, and therefore resemble each other most in their impact on the overall protein structure (Schulz, G. E. and Schirmer, R. H., supra). Non-limiting examples of conservative mutations include amino acid substitutions of amino acids, for example, lysine for arginine and vice versa such that a positive charge can be maintained; glutamic acid for aspartic acid and vice versa such that a negative charge can be maintained; serine for threonine such that a free —OH can be maintained; and glutamine for asparagine such that a free —NH₂ can be maintained.

[0067] The term “coding sequence” or “protein coding sequence” as used interchangeably herein refers to a segment of a polynucleotide that codes for a protein. Coding sequences can also be referred to as open reading frames. The region or sequence is bounded nearer the 5′ end by a start codon and nearer the 3′ end with a stop codon. Stop codons useful with the base editors described herein include the following: TAG, TAA, and TGA.

[0068] By “complex” is meant a combination of two or more molecules whose interaction relies on inter-molecular forces. Non-limiting examples of inter-molecular forces include covalent and non-covalent interactions. Non-limiting examples of non-covalent interactions include hydrogen bonding, ionic bonding, halogen bonding, hydrophobic bonding, van der Waals interactions (e.g., dipole-dipole interactions, dipole-induced dipole interactions, and London dispersion forces), and 7-effects. In an embodiment, a complex comprises polypeptides, polynucleotides, or a combination of one or more polypeptides and one or more polynucleotides. In one embodiment, a complex comprises one or more polypeptides that associate to form a base editor (e.g., base editor comprising a nucleic acid programmable DNA binding protein, such as Cas9, and a deaminase) and a polynucleotide (e.g., a guide RNA). In an embodiment, the complex is held together by hydrogen bonds. It should be appreciated that one or more components of a base editor (e.g., a deaminase, or a nucleic acid programmable DNA binding protein) may associate covalently or non-covalently. As one example, a base editor may include a deaminase covalently linked to a nucleic acid programmable DNA binding protein (e.g., by a peptide bond). Alternatively, a base editor may include a deaminase and a nucleic acid programmable DNA binding protein that associate noncovalently (e.g., where one or more components of the base editor are supplied in trans and associate directly or via another molecule such as a protein or nucleic acid). In an embodiment, one or more components of the complex are held together by hydrogen bonds.

[0069] By “cytosine” or “4-Aminopyrimidin-2(1H)-one” is meant a purine nucleobase with the molecular formula C₄H₅N₃O, having the structure

[chemical structure]

and corresponding to CAS No. 71-30-7.

[0070] By “cytidine” is meant a cytosine molecule attached to a ribose sugar via a glycosidic bond, having the structure

[chemical structure]

and corresponding to CAS No. 65-46-3.

[0071] Its molecular formula is C9H13N305.

[0072] By “Cytidine Base Editor (CBE)” is meant a base editor comprising a cytidine deaminase.

[0073] By “Cytidine Base Editor (CBE) polynucleotide” is meant a polynucleotide encoding a CBE.

[0074] By “cytidine deaminase” or “cytosine deaminase” is meant a polypeptide or fragment thereof capable of deaminating cytidine or cytosine. In embodiments, the cytidine or cytosine is present in a polynucleotide. In one embodiment, the cytidine deaminase converts cytosine to uracil or 5-methylcytosine to thymine. The terms “cytidine deaminase” and “cytosine deaminase” are used interchangeably throughout the application. Petromyzon marinus cytosine deaminase 1 (PmCDA1) (SEQ ID NO: 13-14), Activation-induced cytidine deaminase (AICDA) (SEQ ID NOs: 15-21), and APOBEC (SEQ ID NOs: 12-61) are exemplary cytidine deaminases. Further exemplary cytidine deaminase (CDA) sequences are provided in the Sequence Listing as SEQ ID NOs: 62-66 and SEQ ID NOs: 67-189. Non-limiting examples of cytidine deaminases include those described in PCT/US20/16288, PCT/US2018/021878, 180802-021804/PCT, PCT/US2018/048969, and PCT/US2016/058344.

[0075] By “cytosine deaminase activity” is meant catalyzing the deamination of cytosine or cytidine. In one embodiment, a polypeptide having cytosine deaminase activity converts an amino group to a carbonyl group. In an embodiment, a cytosine deaminase converts cytosine to uracil (i.e., C to U) or 5-methylcytosine to thymine (i.e., 5mC to T). In some embodiments, a cytosine deaminase as provided herein has increased cytosine deaminase activity (e.g., at least 10-fold, 20-fold, 30-fold, 40-fold, 50-fold, 60-fold, 70-fold, 80-fold, 90-fold, 100-fold or more) relative to a reference cytosine deaminase.

[0076] The term “deaminase” or “deaminase domain,” as used herein, refers to a protein or fragment thereof that catalyzes a deamination reaction.

[0077] “Detect” refers to identifying the presence, absence, or amount of the analyte to be detected. In one embodiment, a sequence alteration in a polynucleotide or polypeptide is detected. In another embodiment, the presence of indels is detected.

[0078] By “detectable label” is meant a composition that when linked to a molecule of interest renders the latter detectable, via spectroscopic, photochemical, biochemical, immunochemical, or chemical means. For example, useful labels include radioactive isotopes, magnetic beads, metallic beads, colloidal particles, fluorescent dyes, electron-dense reagents, enzymes (for example, as commonly used in an enzyme linked immunosorbent assay (ELISA)), biotin, digoxigenin, or haptens.

[0079] By “disease” is meant any condition or disorder that damages or interferes with the normal function of a cell, tissue, or organ. Exemplary diseases include, but are not limited to, retinal dystrophies (e.g., severe retinal dystrophy), degenerative eye diseases, and congenital eye diseases (e.g., Leber's Congenital Amaurosis-10 (LCA10)). Without wishing to be bound by any particular theory, it has been recognized that some skilled artisans consider LCA to be a severe form of retinitis pigmentosa. Accordingly, the disclosure contemplates methods of treating severe forms retinitis pigmentosa.

[0080] By “dual editing activity” or “dual deaminase activity” is meant having adenosine deaminase and cytidine deaminase activity. In one embodiment, a base editor having dual editing activity has both A→G and C→T activity, wherein the two activities are approximately equal or are within about 10% or 20% of each other. In another embodiment, a dual editor has A→G activity that no more than about 10% or 20% greater than C→T activity. In another embodiment, a dual editor has A→G activity that is no more than about 10% or 20% less than C→T activity. In some embodiments, the adenosine deaminase variant has predominantly cytosine deaminase activity, and little, if any, adenosine deaminase activity. In some embodiments, the adenosine deaminase variant has cytosine deaminase activity, and no significant or no detectable adenosine deaminase activity.

[0081] By “effective amount” is meant the amount of an agent or active compound, e.g., a base editor as described herein, that is required to ameliorate the symptoms of a disease relative to an untreated patient or an individual without disease, i.e., a healthy individual, or is the amount of the agent or active compound sufficient to elicit a desired biological response. The effective amount of active compound(s) used to practice the present invention for therapeutic treatment of a disease varies depending upon the manner of administration, the age, body weight, and general health of the subject. Ultimately, the attending physician or veterinarian will decide the appropriate amount and dosage regimen. Such amount is referred to as an “effective” amount. In one embodiment, an effective amount is the amount of a base editor of the invention sufficient to introduce an alteration in a gene of interest in a cell (e.g., a cell in vitro or in vivo). In one embodiment, an effective amount is the amount of a base editor required to achieve a therapeutic effect. Such therapeutic effect need not be sufficient to alter a pathogenic gene in all cells of a subject, tissue, or organ, but only to alter the pathogenic gene in about 1%, 5%, 10%, 25%, 50%, 75% or more of the cells present in a subject, tissue, or organ. In one embodiment, an effective amount is sufficient to ameliorate one or more symptoms of a disease.

[0082] By “fragment” is meant a portion of a polypeptide or nucleic acid molecule. This portion contains, at least about 10%, 20%, 30%, 40%, 50%, 60%, 70%, 80%, or 90% of the entire length of the reference nucleic acid molecule or polypeptide. A fragment may contain 10, 20, 30, 40, 50, 60, 70, 80, 90, or 100, 200, 300, 400, 500, 600, 700, 800, 900, or 1000 nucleotides or amino acids. In some embodiments, the fragment is a functional fragment. By “guide polynucleotide” is meant a polynucleotide or polynucleotide complex which is specific for a target sequence and can form a complex with a polynucleotide programmable nucleotide binding domain protein (e.g., Cas9 or Cpf1). In an embodiment, the guide polynucleotide is a guide RNA (gRNA). gRNAs can exist as a complex of two or more RNAs, or as a single RNA molecule.

[0083] By “increases” is meant a positive alteration of at least 10%, 25%, 50%, 75%, or 100%, or about 1.5 fold, about 2 fold, about 3-fold, about 4-fold, about 5-fold, about 6-fold, about 7-fold, about 8-fold, about 9-fold, about 10-fold, about 15-fold, about 20-fold, about 25-fold, about 30-fold, about 35-fold, about 40-fold, about 45-fold, about 50-fold, or about 100-fold.

[0084] The terms “inhibitor of base repair”, “base repair inhibitor”, “IBR” or their grammatical equivalents refer to a protein that is capable in inhibiting the activity of a nucleic acid repair enzyme, for example a base excision repair enzyme.

[0085] An “intein” is a fragment of a protein that is able to excise itself and join the remaining fragments (the exteins) with a peptide bond in a process known as protein splicing.

[0086] The terms “isolated,” “purified,” or “biologically pure” refer to material that is free to varying degrees from components which normally accompany it as found in its native state. “Isolate” denotes a degree of separation from original source or surroundings. “Purify” denotes a degree of separation that is higher than isolation. A “purified” or “biologically pure” protein is sufficiently free of other materials such that any impurities do not materially affect the biological properties of the protein or cause other adverse consequences. That is, a nucleic acid or peptide of this invention is purified if it is substantially free of cellular material, viral material, or culture medium when produced by recombinant DNA techniques, or chemical precursors or other chemicals when chemically synthesized. Purity and homogeneity are typically determined using analytical chemistry techniques, for example, polyacrylamide gel electrophoresis or high performance liquid chromatography. The term “purified” can denote that a nucleic acid or protein gives rise to essentially one band in an electrophoretic gel. For a protein that can be subjected to modifications, for example, phosphorylation or glycosylation, different modifications may give rise to different isolated proteins, which can be separately purified.

[0087] By “isolated polynucleotide” is meant a nucleic acid molecule that is free of the genes which, in the naturally-occurring genome of the organism from which the nucleic acid molecule of the invention is derived, flank the gene. The term therefore includes, for example, a recombinant DNA that is incorporated into a vector; into an autonomously replicating plasmid or virus; or into the genomic DNA of a prokaryote or eukaryote; or that exists as a separate molecule (for example, a cDNA or a genomic or cDNA fragment produced by PCR or restriction endonuclease digestion) independent of other sequences. In addition, the term includes an RNA molecule that is transcribed from a DNA molecule, as well as a recombinant DNA that is part of a hybrid gene encoding additional polypeptide sequence.

[0088] By an “isolated polypeptide” is meant a polypeptide of the invention that has been separated from components that naturally accompany it. Typically, the polypeptide is isolated when it is at least 60%, by weight, free from the proteins and naturally-occurring organic molecules with which it is naturally associated. Preferably, the preparation is at least 75%, more preferably at least 90%, and most preferably at least 99%, by weight, a polypeptide of the invention. An isolated polypeptide of the invention may be obtained, for example, by extraction from a natural source, by expression of a recombinant nucleic acid encoding such a polypeptide; or by chemically synthesizing the protein. Purity can be measured by any appropriate method, for example, column chromatography, polyacrylamide gel electrophoresis, or by HPLC analysis.

[0089] The term “linker”, as used herein, refers to a molecule that links two moieties. In one embodiment, the term “linker” refers to a covalent linker (e.g., covalent bond) or a non-covalent linker.

[0090] By “marker” is meant any protein or polynucleotide having an alteration in expression, level, structure, or activity that is associated with a disease or disorder. In embodiments, the disease is a retinal dystrophy (e.g., severe retinal dystrophy) or Leber's Congenital Amaurosis-10 (LCA10). In some instances, the marker is a single nucleotide polymorphism, such as the IVS26 pathogenic mutation to the CEP290 gene (i.e., CEP290 c.2991+1655A>G). Non-limiting examples of markers a CEP290 transcript (e.g., a properly or improperly spliced transcript) or a CEP290 polypeptide (e.g., a full length or truncated CEP290 polypeptide).

[0091] The term “mutation,” as used herein, refers to a substitution of a residue within a sequence, e.g., a nucleic acid or amino acid sequence, with another residue, or a deletion or insertion of one or more residues within a sequence. Mutations are typically described herein by identifying the original residue followed by the position of the residue within the sequence and by the identity of the newly substituted residue. Various methods for making the amino acid substitutions (mutations) provided herein are well known in the art, and are provided by, for example, Green and Sambrook, Molecular Cloning: A Laboratory Manual (4^{th} ed., Cold Spring Harbor Laboratory Press, Cold Spring Harbor, N.Y. (2012)).

[0092] The terms “nucleic acid” and “nucleic acid molecule,” as used herein, refer to a compound comprising a nucleobase and an acidic moiety, e.g., a nucleoside, a nucleotide, or a polymer of nucleotides. Typically, polymeric nucleic acids, e.g., nucleic acid molecules comprising three or more nucleotides are linear molecules, in which adjacent nucleotides are linked to each other via a phosphodiester linkage. In some embodiments, “nucleic acid” refers to individual nucleic acid residues (e.g., nucleotides and/or nucleosides). In some embodiments, “nucleic acid” refers to an oligonucleotide chain comprising three or more individual nucleotide residues. As used herein, the terms “oligonucleotide” and “polynucleotide” can be used interchangeably to refer to a polymer of nucleotides (e.g., a string of at least three nucleotides). In some embodiments, “nucleic acid” encompasses RNA as well as single and/or double-stranded DNA. Nucleic acids may be naturally occurring, for example, in the context of a genome, a transcript, an mRNA, tRNA, rRNA, siRNA, snRNA, a plasmid, cosmid, chromosome, chromatid, or other naturally occurring nucleic acid molecule. On the other hand, a nucleic acid molecule may be a non-naturally occurring molecule, e.g., a recombinant DNA or RNA, an artificial chromosome, an engineered genome, or fragment thereof, or a synthetic DNA, RNA, DNA/RNA hybrid, or including non-naturally occurring nucleotides or nucleosides. Furthermore, the terms “nucleic acid,” “DNA,” “RNA,” and/or similar terms include nucleic acid analogs, e.g., analogs having other than a phosphodiester backbone. Nucleic acids can be purified from natural sources, produced using recombinant expression systems and optionally purified, chemically synthesized, etc. Where appropriate, e.g., in the case of chemically synthesized molecules, nucleic acids comprise nucleoside analogs such as analogs having chemically modified bases or sugars, and backbone modifications. A nucleic acid sequence is presented in the 5′ to 3′ direction unless otherwise indicated. In some embodiments, a nucleic acid is or comprises natural nucleosides (e.g. adenosine, thymidine, guanosine, cytidine, uridine, deoxyadenosine, deoxythymidine, deoxyguanosine, and deoxycytidine); nucleoside analogs (e.g., 2-aminoadenosine, 2-thiothymidine, inosine, pyrrolo-pyrimidine, 3-methyl adenosine, 5-methylcytidine, 2-aminoadenosine, C5-bromouridine, C5-fluorouridine, C5-iodouridine, C5-propynyl-uridine, C5-propynyl-cytidine, C5-methylcytidine, 2-aminoadenosine, 7-deazaadenosine, 7-deazaguanosine, 8-oxoadenosine, 8-oxoguanosine, 0(6)-methylguanine, and 2-thiocytidine); chemically modified bases; biologically modified bases (e.g., methylated bases); intercalated bases; modified sugars (e.g., 2′-fluororibose, ribose, 2′-deoxyribose, arabinose, and hexose); and/or modified phosphate groups (e.g., phosphorothioates and 5′-N-phosphoramidite linkages).

[0093] The term “nuclear localization sequence,” “nuclear localization signal,” or “NLS” refers to an amino acid sequence that promotes import of a protein into the cell nucleus. Nuclear localization sequences are known in the art and described, for example, in Plank et al., International PCT application, PCT/EP2000/011690, filed Nov. 23, 2000, published as WO/2001/038547 on May 31, 2001, the contents of which are incorporated herein by reference for their disclosure of exemplary nuclear localization sequences. In other embodiments, the NLS is an optimized NLS described, for example, by Koblan et al., Nature Biotech. 2018 doi:10.1038/nbt.4172. In some embodiments, an NLS comprises the amino acid sequence

(SEQ ID NO: 190)
KRTADGSEFESPKKKRKV,
(SEQ ID NO: 191)
KRPAATKKAGQAKKKK,
(SEQ ID NO: 192)
KKTELQTTNAENKTKKL,
(SEQ ID NO: 193)
KRGINDRNFWRGENGRKTR,
(SEQ ID NO: 194)
RKSGKIAAIVVKRPRK,
(SEQ ID NO: 195)
PKKKRKV,
(SEQ ID NO: 196)
MDSLLMNRRKFLYQFKNVRWAKGRRETYLC,
(SEQ ID NO: 328)
PKKKRKVEGADKRTADGSEFESPKKKRKV,
or
(SEQ ID NO: 329)
RKSGKIAAIVVKRPRKPKKKRKV.

[0094] The term “nucleobase,” “nitrogenous base,” or “base,” used interchangeably herein, refers to a nitrogen-containing biological compound that forms a nucleoside, which in turn is a component of a nucleotide. The ability of nucleobases to form base pairs and to stack one upon another leads directly to long-chain helical structures such as ribonucleic acid (RNA) and deoxyribonucleic acid (DNA). Five nucleobases—adenine (A), cytosine (C), guanine (G), thymine (T), and uracil (U)—are called primary or canonical. Adenine and guanine are derived from purine, and cytosine, uracil, and thymine are derived from pyrimidine. DNA and RNA can also contain other (non-primary) bases that are modified. Non-limiting exemplary modified nucleobases can include hypoxanthine, xanthine, 7-methylguanine, 5,6-dihydrouracil, 5-methylcytosine (m5C), and 5-hydromethylcytosine. Hypoxanthine and xanthine can be created through mutagen presence, both of them through deamination (replacement of the amine group with a carbonyl group). Hypoxanthine can be modified from adenine. Xanthine can be modified from guanine. Uracil can result from deamination of cytosine. A “nucleoside” consists of a nucleobase and a five carbon sugar (either ribose or deoxyribose). Examples of a nucleoside include adenosine, guanosine, uridine, cytidine, 5-methyluridine (m5U), deoxyadenosine, deoxyguanosine, thymidine, deoxyuridine, and deoxycytidine. Examples of a nucleoside with a modified nucleobase includes inosine (I), xanthosine (X), 7-methylguanosine (m7G), dihydrouridine (D), 5-methylcytidine (m5C), and pseudouridine (Ψ). A “nucleotide” consists of a nucleobase, a five carbon sugar (either ribose or deoxyribose), and at least one phosphate group. Non-limiting examples of modified nucleobases and/or chemical modifications that a modified nucleobase may include are the following: pseudo-uridine, 5-Methyl-cytosine, 2′-O-methyl-3′-phosphonoacetate, 2′-O-methyl thioPACE (MSP), 2′-O-methyl-PACE (MP), 2′-fluoro RNA (2′-F-RNA), constrained ethyl (S-cEt), 2′-O-methyl (‘M’), 2′-O-methyl-3′-phosphorothioate (‘MS’), 2′-O-methyl-3′-thiophosphonoacetate (‘MSP’), 5-methoxyuridine, phosphorothioate, and N1-Methylpseudouridine.

[0095] The term “nucleic acid programmable DNA binding protein” or “napDNAbp” may be used interchangeably with “polynucleotide programmable nucleotide binding domain” to refer to a protein that associates with a nucleic acid (e.g., DNA or RNA), such as a guide nucleic acid or guide polynucleotide (e.g., gRNA), that guides the napDNAbp to a specific nucleic acid sequence. In some embodiments, the polynucleotide programmable nucleotide binding domain is a polynucleotide programmable DNA binding domain. In some embodiments, the polynucleotide programmable nucleotide binding domain is a polynucleotide programmable RNA binding domain. In some embodiments, the polynucleotide programmable nucleotide binding domain is a Cas9 protein. A Cas9 protein can associate with a guide RNA that guides the Cas9 protein to a specific DNA sequence that is complementary to the guide RNA. In some embodiments, the napDNAbp is a Cas9 domain, for example a nuclease active Cas9, a Cas9 nickase (nCas9), or a nuclease inactive Cas9 (dCas9). Non-limiting examples of nucleic acid programmable DNA binding proteins include, Cas9 (e.g., dCas9 and nCas9), Cas12a/Cpf1, Cas12b/C2c1, Cas12c/C2c3, Cas12d/CasY, Cas12e/CasX, Cas12g, Cas12h, Cas12i, and Cas12j/CasΦ (Cas12j/Casphi). Non-limiting examples of Cas enzymes include Cas1, Cas1B, Cas2, Cas3, Cas4, Cas5, Cas5d, Cas5t, Cas5h, Cas5a, Cas6, Cas7, Cas8, Cas8a, Cas8b, Cas8c, Cas9 (also known as Csn1 or Csx12), Cas10, Cas10d, Cas12a/Cpf1, Cas12b/C2c1, Cas12c/C2c3, Cas12d/CasY, Cas12e/CasX, Cas12g, Cas12h, Cas12i, Cas12j/CasD, Cpf1, Csy1, Csy2, Csy3, Csy4, Cse1, Cse2, Cse3, Cse4, Cse5e, Csc1, Csc2, Csa5, Csn1, Csn2, Csm1, Csm2, Csm3, Csm4, Csm5, Csm6, Cmr1, Cmr3, Cmr4, Cmr5, Cmr6, Csb1, Csb2, Csb3, Csx17, Csx14, Csx10, Csx16, CsaX, Csx3, Csx1, Csx1S, Csx11, Csf1, Csf2, CsO, Csf4, Csd1, Csd2, Cst1, Cst2, Csh1, Csh2, Csa1, Csa2, Csa3, Csa4, Csa5, Type II Cas effector proteins, Type V Cas effector proteins, Type VI Cas effector proteins, CARF, DinG, homologues thereof, or modified or engineered versions thereof. Other nucleic acid programmable DNA binding proteins are also within the scope of this disclosure, although they may not be specifically listed in this disclosure. See, e.g., Makarova et al. “Classification and Nomenclature of CRISPR-Cas Systems: Where from Here?” CRISPR J. 2018 October; 1:325-336. doi: 10.1089/crispr.2018.0033; Yan et al., “Functionally diverse type V CRISPR-Cas systems” Science. 2019 Jan. 4; 363(6422):88-91. doi: 10.1126/science.aav7271, the entire contents of each are hereby incorporated by reference. Exemplary nucleic acid programmable DNA binding proteins and nucleic acid sequences encoding nucleic acid programmable DNA binding proteins are provided in the Sequence Listing as SEQ ID NOs: 197-245, 254-260, and 378.

[0096] The terms “nucleobase editing domain” or “nucleobase editing protein,” as used herein, refers to a protein or enzyme that can catalyze a nucleobase modification in RNA or DNA, such as cytosine (or cytidine) to uracil (or uridine) or thymine (or thymidine), and adenine (or adenosine) to hypoxanthine (or inosine) deaminations, as well as non-templated nucleotide additions and insertions. In some embodiments, the nucleobase editing domain is a deaminase domain (e.g., an adenine deaminase or an adenosine deaminase; or a cytidine deaminase or a cytosine deaminase).

[0097] As used herein, “obtaining” as in “obtaining an agent” includes synthesizing, purchasing, or otherwise acquiring the agent.

[0098] By “subject” or “patient” is meant a mammal, including, but not limited to, a human or non-human mammal. In embodiments, the mammal is a bovine, equine, canine, ovine, rabbit, rodent, nonhuman primate, or feline. In an embodiment, “patient” refers to a mammalian subject with a higher than average likelihood of developing a disease or a disorder. Exemplary patients can be humans, non-human primates, cats, dogs, pigs, cattle, cats, horses, camels, llamas, goats, sheep, rodents (e.g., mice, rabbits, rats, or guinea pigs) and other mammalians that can benefit from the therapies disclosed herein. Exemplary human patients can be male and/or female.

[0099] “Patient in need thereof” or “subject in need thereof” is referred to herein as a patient diagnosed with, at risk or having, predetermined to have, or suspected of having a disease or disorder.

[0100] The terms “pathogenic mutation”, “pathogenic variant”, “disease causing mutation”, “disease causing variant”, “deleterious mutation”, or “predisposing mutation” refers to a genetic alteration or mutation that is associated with a disease or disorder or that increases an individual's susceptibility or predisposition to a certain disease or disorder. In some embodiments, the pathogenic mutation comprises at least one wild-type amino acid substituted by at least one pathogenic amino acid in a protein encoded by a gene. In some embodiments, the pathogenic mutation is in a terminating region (e.g., stop codon). In some embodiments, the pathogenic mutation is in a non-coding region (e.g., intron, promoter, etc.). In some cases, the pathogenic mutation is the IVS26 mutation to the CEP290 gene, namely CEP290 c.2991+1655A>G.

[0101] The terms “protein”, “peptide”, “polypeptide”, and their grammatical equivalents are used interchangeably herein, and refer to a polymer of amino acid residues linked together by peptide (amide) bonds. A protein, peptide, or polypeptide can be naturally occurring, recombinant, or synthetic, or any combination thereof.

[0102] The term “fusion protein” as used herein refers to a hybrid polypeptide which comprises protein domains from at least two different proteins.

[0103] The term “recombinant” as used herein in the context of proteins or nucleic acids refers to proteins or nucleic acids that do not occur in nature but are the product of human engineering. For example, in some embodiments, a recombinant protein or nucleic acid molecule comprises an amino acid or nucleotide sequence that comprises at least one, at least two, at least three, at least four, at least five, at least six, or at least seven mutations as compared to any naturally occurring sequence.

[0104] By “reduces” is meant a negative alteration of at least 10%, 25%, 50%, 75%, or 100%.

[0105] By “reference” is meant a standard or control condition. In one embodiment, the reference is a wild-type or healthy cell. In other embodiments and without limitation, a reference is an untreated cell that is not subjected to a test condition, or is subjected to placebo or normal saline, medium, buffer, and/or a control vector that does not harbor a polynucleotide of interest. In some cases, a reference is an untreated subject or cell. In some instances, a reference is a healthy cell that does not contain the IVS26 pathogenic mutation in the CEP290 gene (CEP290 c.2991+1655A>G). In some cases, a reference is a cell that does contain the IVS26 pathogenic mutation in the CEP290 gene (CEP290 c.2991+1655A>G). In embodiments, a reference is a healthy and/or untreated eye cell, retinal cell, cone cell, and/or rod cell.

[0106] A “reference sequence” is a defined sequence used as a basis for sequence comparison. A reference sequence may be a subset of or the entirety of a specified sequence; for example, a segment of a full-length cDNA or gene sequence, or the complete cDNA or gene sequence. For polypeptides, the length of the reference polypeptide sequence will generally be at least about 16 amino acids, at least about 20 amino acids, at least about 25 amino acids, about 35 amino acids, about 50 amino acids, or about 100 amino acids. For nucleic acids, the length of the reference nucleic acid sequence will generally be at least about 50 nucleotides, at least about 60 nucleotides, at least about 75 nucleotides, about 100 nucleotides or about 300 nucleotides or any integer thereabout or therebetween. In some embodiments, a reference sequence is a wild-type sequence of a protein of interest. In other embodiments, a reference sequence is a polynucleotide sequence encoding a wild-type protein.

[0107] The term “RNA-programmable nuclease,” and “RNA-guided nuclease” refer to a nuclease that forms a complex with (e.g., binds or associates with) one or more RNA(s) that is not a target for cleavage. In some embodiments, an RNA-programmable nuclease, when in a complex with an RNA, may be referred to as a nuclease:RNA complex. Typically, the bound RNA(s) is referred to as a guide RNA (gRNA). In some embodiments, the RNA-programmable nuclease is the (CRISPR-associated system) Cas9 endonuclease, for example, Cas9 (Csn1) from Streptococcus pyogenes (e.g., SEQ ID NO: 197), Cas9 from Neisseria meningitidis (NmeCas9; SEQ ID NO: 208), Nme2Cas9 (SEQ ID NO: 209), Streptococcus constellatus (ScoCas9) or derivatives thereof (e.g., a sequence with at least about 85% sequence identity to a Cas9, such as Nme2Cas9 or spCas9).

[0108] The term “single nucleotide polymorphism (SNP)” is a variation in a single nucleotide that occurs at a specific position in the genome, where each variation is present to some degree within a population. In embodiments, an SNP is present in about or at least about 1, 2, 3, 4, or 5 individuals per 100,000 individuals in a population. SNPs can fall within coding regions of genes, non-coding regions of genes, or in the intergenic regions (regions between genes). In some embodiments, SNPs within a coding sequence do not necessarily change the amino acid sequence of the protein that is produced, due to degeneracy of the genetic code. SNPs in the coding region are of two types: synonymous and nonsynonymous SNPs. Synonymous SNPs do not affect the protein sequence, while nonsynonymous SNPs change the amino acid sequence of protein. The nonsynonymous SNPs are of two types: missense and nonsense. SNPs that are not in protein-coding regions can still affect gene splicing, transcription factor binding, messenger RNA degradation, or the sequence of noncoding RNA. Gene expression affected by this type of SNP is referred to as an eSNP (expression SNP) and can be upstream or downstream from the gene. A single nucleotide variant (SNV) is a variation in a single nucleotide without any limitations of frequency and can arise in somatic cells. A somatic single nucleotide variation can also be called a single-nucleotide alteration. A non-limiting example of an SNP is the IVS26 pathogenic mutation in the CEP290 gene (CEP290 c.2991+1655A>G).

[0109] By “specifically binds” is meant a nucleic acid molecule, polypeptide, polypeptide/polynucleotide complex, compound, or molecule that recognizes and binds a polypeptide and/or nucleic acid molecule of the invention, but which does not substantially recognize and bind other molecules in a sample, for example, a biological sample.

[0110] By “substantially identical” is meant a polypeptide or nucleic acid molecule exhibiting at least 50% identity to a reference amino acid sequence. In one embodiment, a reference sequence is a wild-type amino acid or nucleic acid sequence. In another embodiment, a reference sequence is any one of the amino acid or nucleic acid sequences described herein. In one embodiment, such a sequence is at least about 60%, 80%, 85%, 90%, 95%, 96%, 97%, 98%, 99%, 99.9%, or even 99.99%, identical at the amino acid level or nucleic acid level to the sequence used for comparison.

[0111] Sequence identity is typically measured using sequence analysis software (for example, Sequence Analysis Software Package of the Genetics Computer Group, University of Wisconsin Biotechnology Center, 1710 University Avenue, Madison, Wis. 53705, BLAST, BESTFIT, GAP, or PILEUP/PRETTYBOX programs). Such software matches identical or similar sequences by assigning degrees of homology to various substitutions, deletions, and/or other modifications. Conservative substitutions typically include substitutions within the following groups: glycine, alanine; valine, isoleucine, leucine; aspartic acid, glutamic acid, asparagine, glutamine; serine, threonine; lysine, arginine; and phenylalanine, tyrosine.

[0112] Nucleic acid molecules useful in the methods of the invention include any nucleic acid molecule that encodes a polypeptide of the invention or a functional fragment thereof. Such nucleic acid molecules need not be 100% identical with an endogenous nucleic acid sequence but will typically exhibit substantial identity. Polynucleotides having “substantial identity” to an endogenous sequence are typically capable of hybridizing with at least one strand of a double-stranded nucleic acid molecule. Nucleic acid molecules useful in the methods of the invention include any nucleic acid molecule that encodes a polypeptide of the invention or a functional fragment thereof. Such nucleic acid molecules need not be 100% identical with an endogenous nucleic acid sequence but will typically exhibit substantial identity. Polynucleotides having “substantial identity” to an endogenous sequence are typically capable of hybridizing with at least one strand of a double-stranded nucleic acid molecule. By “hybridize” is meant pair to form a double-stranded molecule between complementary polynucleotide sequences (e.g., a gene described herein), or portions thereof, under various conditions of stringency. (See, e.g., Wahl, G. M. and S. L. Berger (1987) Methods Enzymol. 152:399; Kimmel, A. R. (1987) Methods Enzymol. 152:507).

[0113] By “split” is meant divided into two or more fragments.

[0114] A “split polypeptide” or “split protein” refers to a protein that is provided as an N-terminal fragment and a C-terminal fragment translated as two separate polypeptides from a nucleotide sequence(s). The polypeptides corresponding to the N-terminal portion and the C-terminal portion of the split protein may be spliced in some embodiments to form a “reconstituted” protein. In embodiments, the split polypeptide is a nucleic acid programmable DNA binding protein (e.g. a Cas9) or a base editor.

[0115] The term “target site” refers to a nucleotide sequence or nucleobase of interest within a nucleic acid molecule that is modified. In embodiments, the modification is deamination of a base. The deaminase can be a cytidine or an adenine deaminase. The fusion protein or base editing complex comprising a deaminase may comprise a dCas9-adenosine deaminase fusion protein, a Cas12b-adenosine deaminase fusion, or a base editor disclosed herein.

[0116] As used herein, the terms “treat,” treating,” “treatment,” and the like refer to reducing or ameliorating a disorder and/or symptoms associated therewith or obtaining a desired pharmacologic and/or physiologic effect. It will be appreciated that, although not precluded, treating a disorder or condition does not require that the disorder, condition, or symptoms associated therewith be completely eliminated. In some embodiments, the effect is therapeutic, i.e., without limitation, the effect partially or completely reduces, diminishes, abrogates, abates, alleviates, decreases the intensity of, or cures a disease and/or adverse symptom attributable to the disease. In some embodiments, the effect is preventative, i.e., the effect protects or prevents an occurrence or reoccurrence of a disease or condition. To this end, the presently disclosed methods comprise administering a therapeutically effective amount of a composition as described herein.

[0117] By “uracil glycosylase inhibitor” or “UGI” is meant an agent that inhibits the uracil-excision repair system. Base editors comprising a cytidine deaminase convert cytosine to uracil, which is then converted to thymine through DNA replication or repair. In various embodiments, a uracil DNA glycosylase (UGI) prevent base excision repair which changes the U back to a C. In some instances, contacting a cell and/or polynucleotide with a UGI and a base editor prevents base excision repair which changes the U back to a C. An exemplary UGI comprises an amino acid sequence as follows:

>sp|P14739|UNGI_BPPB2 Uracil-DNA glycosylase inhibitor
(SEQ ID NO: 231)
MTNLSDIIEKETGKQLVIQESILMLPEEVEEVIGNKPESDILVHTAYDESTDENVMLLTSDA
PEYKPWALVIQDSNGENKIKML.

[0118] In some embodiments, the agent inhibiting the uracil-excision repair system is a uracil stabilizing protein (USP). See, e.g., WO 2022015969 A1, incorporated herein by reference.

[0119] As used herein, the term “vector” refers to a means of introducing a nucleic acid molecule into a cell, resulting in a transformed cell. Vectors include plasmids, transposons, phages, viruses, liposomes, lipid nanoparticles, and episomes. “Expression vectors” are nucleic acid sequences comprising the nucleotide sequence to be expressed in the recipient cell. Expression vectors contain a polynucleotide sequence as well as additional nucleic acid sequences to promote and/or facilitate the expression of the introduced sequence, such as start, stop, enhancer, promoter, and secretion sequences, into the genome of a mammalian cell. Examples of vectors include nucleic acid vectors, e.g., DNA vectors, such as plasmids, RNA vectors, viruses, or other suitable replicons (e.g., viral vectors). A variety of vectors have been developed for the delivery of polynucleotides encoding exogenous proteins into a prokaryotic or eukaryotic cell. Examples of such expression vectors are disclosed in, e.g., WO 1994/11026; incorporated herein by reference. Certain vectors that can be used for the expression of base editor polypeptides, base editor systems, or components thereof of some aspects and embodiments herein include plasmids that contain regulatory sequences, such as promoter and enhancer regions, which direct gene transcription. Other useful vectors for expression of antibodies and antibody fragments contain polynucleotide sequences that enhance the rate of translation of these genes or improve the stability or nuclear export of the mRNA that results from gene transcription. These sequence elements include, e.g., 5′ and 3′ untranslated regions, an internal ribosomal entry site (IRES), and polyadenylation signal site in order to direct efficient transcription of the gene carried on the expression vector. The expression vectors of some aspects and embodiments herein may also contain a polynucleotide encoding a marker for selection of cells that contain such a vector. Examples of a suitable marker include genes that encode resistance to antibiotics, such as ampicillin, chloramphenicol, kanamycin, or nourseothricin. In embodiments, the vector is an AAV vector (e.g., AAV5, PHB.EB, or PHB.EB).

[0120] Ranges provided herein are understood to be shorthand for all of the values within the range. For example, a range of 1 to 50 is understood to include any number, combination of numbers, or sub-range from the group consisting 1, 2, 3, 4, 5, 6, 7, 8, 9, 10, 11, 12, 13, 14, 15, 16, 17, 18, 19, 20, 21, 22, 23, 24, 25, 26, 27, 28, 29, 30, 31, 32, 33, 34, 35, 36, 37, 38, 39, 40, 41, 42, 43, 44, 45, 46, 47, 48, 49, or 50.

[0121] The recitation of a listing of chemical groups in any definition of a variable herein includes definitions of that variable as any single group or combination of listed groups. The recitation of an embodiment for a variable or aspect herein includes that embodiment as any single embodiment or in combination with any other embodiments or portions thereof.

[0122] All terms are intended to be understood as they would be understood by a person skilled in the art. Unless defined otherwise, all technical and scientific terms used herein have the same meaning as commonly understood by one of ordinary skill in the art to which the disclosure pertains

[0123] In this application, the use of the singular includes the plural unless specifically stated otherwise. It must be noted that, as used in the specification, the singular forms “a,” “an” and “the” include plural referents unless the context clearly dictates otherwise. In this application, the use of “or” means “and/or” unless stated otherwise. Furthermore, use of the term “including” as well as other forms, such as “include”, “includes,” and “included,” is not limiting.

[0124] As used in this specification and claim(s), the words “comprising” (and any form of comprising, such as “comprise” and “comprises”), “having” (and any form of having, such as “have” and “has”), “including” (and any form of including, such as “includes” and “include”) or “containing” (and any form of containing, such as “contains” and “contain”) are inclusive or open-ended. This wording indicates that specified elements, features, components, and/or method steps are present, but does not exclude the presence of other elements, features, components, and/or method steps. Any embodiments specified as “comprising” a particular component(s) or element(s) are also contemplated as “consisting of” or “consisting essentially of” the particular component(s) or element(s) in some embodiments. It is contemplated that any embodiment discussed in this specification can be implemented with respect to any method or composition of the present disclosure, and vice versa. Furthermore, compositions of the present disclosure can be used to achieve methods of the present disclosure.

[0125] The term “about” or “approximately” means within an acceptable error range for the particular value as determined by one of ordinary skill in the art, which will depend in part on how the value is measured or determined, i.e., the limitations of the measurement system.

[0126] Reference in the specification to “some embodiments,” “an embodiment,” “one embodiment” or “other embodiments” means that a particular feature, structure, or characteristic described in connection with the embodiments is included in at least some embodiments, but not necessarily all embodiments, of the present disclosures.

### BRIEF DESCRIPTION OF THE DRAWINGS

[0127] FIGS. 1A and 1B provide schematics showing an overview of a mutation to CEP290 associated with Leber's Congenital Amaurosis-10. FIG. 1A provides a schematic showing splicing of a healthy version of the CEP290 gene. FIG. 1B provides a schematic showing splicing of a CEP290 gene containing a pathogenic c.2991+1655A>G mutation creating a new splice donor site (i.e., a cryptic splice donor site). The pathogenic mutation leads to a premature stop codon (e.g., p.Cys998X).

[0128] FIGS. 2A and 2B provide schematics showing base editing strategies for treating LCA-10. FIG. 2A provides a schematic showing a base editing strategy for direct correction of a pathogenic allele associated with LCA10. The c.2991+1655A>G mutation can be targeted using a cytidine base editor (CBE), where altering a C target base to a T results in reversion of the complementary (i.e., on the antisense strand) pathogenic G to an A. In FIG. 2A the bold “GT” indicates the splice donor site. The nucleotide sequences shown in FIG. 2A, correspond to SEQ ID NOs: 480 and 512, in order of occurrence. FIG. 2B provides a schematic showing a base editing strategy for disruption of a cryptic splice donor site associated with LCA10. The splice donor for the 128 bp cryptic exon associated with LCA10 is four bases upstream of the pathogenic c.2991+1655A>G allele mutation. The pathogenic A>G mutation makes the surrounding sequence a more ideal splice donor. The lower portion of FIG. 2B provides a schematic (Ma S L, et al. “Whole Exome Sequencing Reveals Novel PHEX Splice Site Mutations in Patients with Hypophosphatemic Rickets,” PLoS One. 2015 Jun. 24; 10(6):e0130729. doi: 10.1371/journal.pone.0130729. PMID: 26107949; PMCID: PMC4479593, the disclosure of which is incorporated herein by reference in its entirety for all purposes) showing a consensus sequence corresponding to splice donor sites across the human genome, where taller letters correspond to bases more frequently observed at a site and where the table below the letters provides a breakdown of the frequency with which each base (A, T, G, C) is observed at each site. In the schematic in the lower portion of FIG. 2B, “5′-Exon” indicates the end of an exon and +1 indicates the first base pair of the following exon 3′ of the Exon. The consensus splice donor “GT” (positions +1 and +2) upstream of the pathogenic mutation (position +5) can be disrupted using an adenosine deaminase (e.g., T>C alteration through deamination of the A complementary to the T) or using a cytidine deaminase (e.g., G>A alteration through deamination of the C complementary to the G).

[0129] FIGS. 3A and 3B provide schematics showing how base editing can be used to treat Leber's Congenital Amaurosis-10 (LCA10). FIG. 3A provides a schematic showing a target site containing a target base that can be altered by a cytidine deaminase base editor to treat LCA10. The sites labeled 9 and 11 in FIG. 3A indicate additional nucleotides in proximity to the target base that, in some embodiments, are altered along with or instead of the target base to result in one or more bystander edits (i.e., alterations of non-target bases). The cytidine deaminase base editor can deaminate the target cytidine (C) to result in a reversion of the complementary guanine (G) to an adenine (A). The nucleotide sequence shown in FIG. 3A (CCCAGTTGTAATTGTGAGTATCTCATA; SEQ ID NO: 480), corresponds to SEQ ID NO: 480. FIG. 3B shows a ˜300 bp lenti-integrated region of interest (ROI) that was incorporated into the genome of a HEK293T cell. The HEK293T cells containing the ROI were suitable for use in undertaking experiments to evaluate the use of base editor systems to treat LCA10. FIG. 3B shows how the unaltered ROI results in aberrant splicing of the gene into which it was integrated. By altering the target base shown in FIG. 3A within the region of interest of FIG. 3B proper splicing of the gene can be restored. To base edit the garget base in the HEK293T cells containing the ROI, the cells were lipofected with plasmid DNA encoding a cytidine deaminase base editor and a guide polynucleotide. Editing at the target site (FIG. 3A) was measured 5 days post-transfection.

[0130] FIG. 4 provides a bar graph showing percent (%) C-to-T conversion relative to the following target site: ATAC₇TC₉AC₁₁AATTACAACTGG (SEQ ID NO: 481) in a HEK293T cell, where the subscripts 7, 9, and 11 indicate the locations of the three base edits referenced in FIG. 4, namely, C7T, C9T, and C11T, respectively. The target site was edited using a plasmid-based rat APOBEC (rAPOBEC) BE4 editor driven by a CMV promoter and the guides indicated on the x-axis of FIG. 4 (see Table 1 for the guide sequences). The guides contained spacers with lengths varying between 18 and 23 nucleotides, and some of the guides included a self-cleaving hammerhead ribozyme (HRz). In FIG. 4, a guide targeting green fluorescent protein (GFP) was used as a control. In FIG. 4, “HRz” indicates a guide RNA containing a hammerhead ribozyme (HRz) at the 5′ end. In FIG. 4 each set of three bars corresponds, in order from left-to-right, to C7T, C9T, and C11T C>T conversion.

[0131] FIG. 5 provides a bar graph showing percent (%) C-to-T conversion relative to the following target site: ATAC₇TC₉AC₁₁AATTACAACTGG (SEQ ID NO: 481) in a HEK293T cell, where the subscripts 7, 9, and 11 indicate the locations of the three base edits referenced in FIG. 5, namely, C7T, C9T, and C11T, respectively. The target site was edited using a plasmid-based rat APOBEC (rAPOBEC) BE4 editor driven by a CMV promoter and the guides indicated on the x-axis of FIG. 5 (see Table 1 for the guide sequences). The guides contained spacers with lengths varying between 18 and 23 nucleotides. In FIG. 5, a guide targeting green fluorescent protein (GFP) was used as a control. In FIG. 5 each set of three bars corresponds, in order from left-to-right, to C7T, C9T, and C11T C>T conversion.

[0132] FIG. 6 provides a bar graph showing percent (%) C-to-T conversion relative to the following target site: ATAC₇TC₉AC₁₁AATTACAACTGG (SEQ ID NO: 481) in a HEK293T cell, where the subscripts 7, 9, and 11 indicate the locations of the three base edits referenced in FIG. 6, namely, C7T, C9T, and C11T, respectively. The target site was edited using split cytidine deaminase base editors (CBEs; see x-axis of FIG. 6) prepared using a Cfa(GEP) split intein fusion, where the editor was split at the amino acid residues corresponding to Glu573 and Cys574 of Cas9. The split editor was encoded by two separate plasmids. Each CBE fragment was expressed from a CMV promoter and a guide RNA was encoded in tandem on the plasmid that encoded the C-terminal split of the base editor and expressed under the control of a U6 promoter. The guides and base editors corresponding to each set of 3 bars in FIG. 6 are indicated on the x-axis, where sequences of the guide polynucleotides are provided in Table 1, and where “rAPOBEC” indicates a base editor containing “rat APOBEC,” “ppAPOBEC” indicates a base editor containing “Pongo pygmaeus (Orangutan) APOBEC,” RrA3F indicates a base editor containing “Rhinopithecus roxellana (golden snub-nosed monkey) APOBEC3F (A3F),” “AmAPOBEC1” indicates a base editor containing “Alligator mississippiensis (American alligator) APOBEC1,” and SsAPOBEC3B indicates a base editor containing “Sus scrofa (pig) APOBEC3B.” The guides contained spacers with lengths varying between 19 and 21 nucleotides. In FIG. 6 each set of three bars corresponds, in order from left-to-right, to C7T, C9T, and C11T C>T conversion.

[0133] FIG. 7 provides a bar graph showing percent (%) C-to-T conversion relative to the following target site: AC₅TC₇AC₉AATTACAACTGGGG (SEQ ID NO: 482) in a HEK293T cells, where the subscripts 5, 7, and 9 indicate the locations of the three base edits reference in FIG. 7, namely, C5T, C7T, and C9T. The target site was edited using a cytidine deaminase base editor (BE4 with rAPOBEC deaminase domain) in combination with the guides indicated on the x-axis, which contained spacers ranging in length from 18 to 22 nucleotides (see Table 1). In FIG. 7 each set of three bars corresponds, in order from left-to-right, to C5T, C7T, and C9T C>T conversion.

[0134] FIG. 8 provides a bar graph showing percent (%) C-to-T conversion at the following target site: CTC₂AC₄AATTAC₁₀AAC₁₃TGGGGCC (SEQ ID NO: 483) in a HEK293T cells, where the subscripts 2, 4, 10, and 13 indicate the locations of the three base edits reference in FIG. 8, namely, C2T, C→T, C10T, and C13T. The target site was edited using a cytidine deaminase base editor (rAPOBEC BE4) in combination with the guides indicated on the x-axis, which ranged in length from 18 to 23 nucleotides (see Table 1). In FIG. 8 the conversions corresponding to each bar are indicated above each bar using the letter a, b, c, and d, where “a” indicates “C2T,” “b” indicates “C→T,” “c” indicates “C10T,” and “d” indicates “C13T.”

### DETAILED DESCRIPTION

[0135] The invention features compositions and methods for editing a 290-KD centrosomal protein (CEP290) gene to treat a congenital eye disorder, such as Leber's Congenital Amaurosis-10. In embodiments, the disclosure provides methods for direct correction of the IVS26 pathogenic mutation in the CEP290 gene (CEP290 c.2991+1655A>G) and/or disruption of a cryptic splice donor site within an intron of the CEP290 gene using a base editor (e.g., a cytidine deaminase base editor, an adenosine deaminase base editor, or a cytidine adenosine deaminase base editor (CABE)).

[0136] The invention is based, at least in part, on the discovery, as shown in the Examples provided herein below, that base editors can be used to directly correct the IVS26 pathogenic mutation in the CEP290 gene (CEP290 c.2991+1655A>G) and/or disruption of a cryptic splice donor site within an intron of an CEP290 gene to treat Leber's Congenital Amaurosis. In particular, it was found that precise correction of the IVS26 pathogenic mutation can be achieved using a cytidine deaminase base editor (e.g., a base editor containing a rAPOBEC, ppAPOBEC, RrA3F, AmAPOBEC1, or SsAPOBEC3B cytidine deaminase domain) with limited bystander edits and with editing efficiencies of about 75% in vitro. It was also found that disruption of a cryptic splice site associated with the IVS26 pathogenic mutation could be achieved using a cytidine deaminase base editor (e.g., a base editor containing a rAPOBEC, ppAPOBEC, RrA3F, AmAPOBEC1, or SsAPOBEC3B cytidine deaminase domain) with editing efficiencies of about 35% in vitro with limited or no detectable bystander editing. Base editing efficiencies of as low as 29% have been found to produce a therapeutic effect in mice in the context of editing the Rpe65 gene to treat Leber congenital amaurosis (see, e.g., Suh, et al., “Restoration of visual function in adult mice with an inherited retinal disease via adenine base editing,” Nat Biomed Eng, 5:169-178 (2021), doi: 10.1038/s41551-020-00632-6, the disclosure of which is incorporated herein by reference in its entirety for all purposes).

### Leber's Congenital Amaurosis-10 (LCA10) and CEP290

[0137] Leber's Congenital Amaurosis-10 (LCA10) is an autosomal recessive disorder causing severe retinal dystrophy. LCA is inherited in an autosomal recessive fashion and accounts for approximately 5% of all inherited retinal dystrophies. LCA10 is associated with severe visual impairment at birth or early childhood that progresses with age. In some cases, LCA10 is associated with loss of peripheral vision and cones remaining present in the fovea. Since LCA10 is characterized in many cases with a loss of peripheral vision, delayed atrophy or degeneration of cone photoreceptors relative to rod receptors provides a target for a one-time base editing strategy.

[0138] Symptoms associated with LCA10 include reduced vision (e.g., extreme farsightedness (hyperopia)), lack of response to visual cues, involuntary roving eye movements (nystagmus), cataracts, corneal abnormality (keratoconus), aversion to light (photophobia), hearing impairment and developmental delays, epilepsy, motor skill impairment, retina deterioration, think or narrow retinal blood vessels, pigmentary changes in the retina, infantile nystagmus, sluggish papillary responses, and/or a paradoxical pupil response. Further, Francechetti's oculo-digital sign is a characteristic of the disease, which involves poking, pressing, and/or tubbing the eyes with a knuckle or finger.

[0139] Approximately 2-3 in 100,000 individuals have LCA10. About 20%-30% of LCA10 cases are due to a mutation to CEP290 (FIGS. 1A and 1B). Up to 80% of those cases (˜1,300 patients in the United States) are due to an intronic mutation that creates a cryptic “GT” splice donor site (FIGS. 2A and 2B) and results in a non-functional truncated protein (FIGS. 1A and 1B). In many cases, the pathogenic mutation is c.2991+1655A>G (“the IVS26 mutation”). Therefore, an effective treatment for LCA10 includes either direction correction of the pathogenic allele (FIG. 2A) using a cytidine deaminase base editor or disruption of the cryptic “GT” splice donor site (FIG. 2B) using an adenosine deaminase base editor or a cytidine deaminase base editor. A cytidine deaminase base editor can be used to deaminate the cytidine (C) complementary to the pathogenic guanine (G) to result in a reversion to adenine (i.e., c.2991+1665A). A cytidine deaminase base editor or an adenosine deaminase base editor can be used to alter the cryptic “GT” splice donor site upstream of the c.2991+1665A>G mutation. In some embodiments, a base editor may be used to simultaneously alter the pathogenic target base and one or more bases of the splice donor site (e.g., using a CABE or a cytidine deaminase base editor). One goal of treatment using a base editing strategy includes preventing the retention of a ˜128 bp cryptic exon (IVS26). An advantage of treating LCA10 using a base editing approach is that off-target and unintended edits are reduced relative to alternative strategies (e.g., a CRISPR approach).

[0140] The notation “c.2991+1665A” indicates exonic nucleotide 2991, where exonic nucleotide 1 corresponds to the “A” of “ATG” corresponding to the first translated codon of mRNA transcribed from the CEP290 gene (i.e., coding (c.) nucleotide 2991), and +1665A indicates an intronic adenine (A) nucleotide at position 1665 of the intron immediately downstream of exonic nucleotide 2991, where intronic nucleotide number 1 is the first nucleotide 3′ of exonic nucleotide 2991.

[0141] 290-KD centrosomal protein (CEP290) encodes a widely expressed centrosomal and ciliary protein of 290 kDa that plays an important role in ciliary trafficking and cilium assembly. In the photoreceptors, CEP290 localizes to the connecting cilium, the transitional zone linking the inner and outer segments of rods and cones. Over 100 CEP290 mutations have been identified that lead to a spectrum of phenotypes ranging from isolated early-onset retinal dystrophy and Leber's Congenital Amaurosis-10 to more severe syndromes such as Senior Loken syndrome, Joubert syndrome, or Meckel-Gruber syndrome (MGS). Hypomorphic CEP290 mutations are generally associated with non-syndromic forms of LCA, and account for an estimated 15% of all LCA cases in the Caucasian population. Not intending to be bound by theory, cones are more vulnerable to mutations to CEP290 compared to rods, which may be a consequence of their higher metabolism. Therefore, the progression of vision loss in Leber's Congenital Amaurosis-10 typically begins with the loss of function primarily of cones and proceeds to the loss of function of rods. Not intending to be bound by theory, subsequent to cone degeneration, rod photoreceptor loss occurs in retinal regions characterized by a low density of rods, while the high rod density retinal regions remain intact. Cones are involved in peripheral vision while rods are important for central vision. Therefore, in some embodiments, the methods of the present disclosure result in a preservation of central vision or slowing of the progressive loss thereof in a subject.

### Editing of Target Genes

[0142] To produce the gene edits described above (e.g., correction of an IVS26 mutation and/or disruption of a cryptic splice site in CEP290), a subject is administered and/or a cell (e.g., a retinal cell such as a rod cell or a cone cell) is contacted with one or more guide polynucleotides (e.g., one or more of those guide polynucleotides (e.g., guide RNAs) listed in Table 1 or containing one or more of the spacers listed in Table 2, fragments thereof, or 3′ and/or 5′ extensions thereof) and a base editor polypeptide comprising a nucleic acid programmable DNA binding protein (napDNAbp) and a cytidine deaminase or adenosine deaminase, or comprising one or more deaminases with cytidine deaminase and/or adenosine deaminase activity (e.g., a “dual deaminase” which has cytidine and adenosine deaminase activity), or a polynucleotide encoding the same. In embodiments, the base editor and/or endonuclease is introduced to a cell or administered to a subject using a polynucleotide sequence (e.g., mRNA) encoding the base editor and/or endonuclease. In embodiments, the base editor and/or guide RNAs is administered to the subject or contacted with the cell using a suitable vector (e.g., an AAV vector or a lipid nanoparticle). In some cases, the vector targets rods and/or cones. Non-limiting examples of suitable vectors for targeting rods and/or cones include AAV5, PHB.EB, and PHP.B AAV vectors. In some embodiments, the subject is administered and/or the cell is contacted with at least one nucleic acid, wherein the at least one nucleic acid encodes one or more guide RNAs and a nucleobase editor polypeptide comprising a nucleic acid programmable DNA binding protein (napDNAbp) and a cytidine deaminase. In some embodiments, the gRNA comprises nucleotide analogs. In some instances, the gRNA is added directly to a cell. These nucleotide analogs can inhibit degradation of the gRNA from cellular processes. Table 2 provides representative spacer sequences to be used for gRNAs.

[0143] Tables 1 and 2 below lists representative guide RNA spacer sequences that can be used in combination with the indicated base editors. Guide RNAs containing the spacer sequences listed in Table 2 can be used to target a base editor (e.g., an adenosine base editor (ABE), a cytidine base editor (CBE), and/or a cytidine adenosine base editor (CABE)) to edit a CEP290 gene. Exemplary spacer sequences suitable for use in gRNA sequences for use in the methods provided herein include fragments of any of the spacers provided in Table 2 as well as any of the spacers provided in Table 2 modified to include an extension or truncation at the 3′ and/or 5′ end(s). In embodiments, a spacer sequence of Table 2 can be modified to include a 1, 2, 3, 4, 5, 6, 7, 8, 9, or 10 nucleotide extension or truncation at the 3′ and/or 5′ end(s).

[0144] In various instances, it is advantageous for a spacer sequence to include a 5′ and/or a 3′ “G” nucleotide (e.g., see the lowercase g's in the guide RNAs listed in Table 1 below). In some cases, for example, any spacer sequence or guide polynucleotide provided herein comprises or further comprises a 5′ “G”, where, in some embodiments, the 5′ “G” is or is not complementary to a target sequence. In some embodiments, the 5′ “G” is added to a spacer sequence that does not already contain a 5′ “G.” For example, it can be advantageous for a guide RNA to include a 5′ terminal “G” when the guide RNA is expressed under the control of a U6 promoter or the like because the U6 promoter prefers a “G” at the transcription start site (see Cong, L. et al. “Multiplex genome engineering using CRISPR/Cas systems. Science 339:819-823 (2013) doi: 10.1126/science.1231143). In some cases, a 5′ terminal “G” is added to a guide polynucleotide that is to be expressed under the control of a promoter but is optionally not added to the guide polynucleotide if or when the guide polynucleotide is not expressed under the control of a promoter.

[0145] In embodiments, a guide polynucleotide provided herein contains a scaffold with about or at least about 85% sequence identity to the following nucleotide sequence:

(SEQ ID NO: 484)
GUUUUAGAGCUAGAAAUAGCAAGUUAAAAUAAGGCUAGUCCGUUAUCAA
CUUGAAAAAGUGGCACCGAGUCGGUGCUUUUUU.

In some cases, a guide polynucleotide of the present disclosure is expressed under the control of a U6 promoter. In some cases, a guide polynucleotide contains the above scaffold and one or more of the spacers listed in Table 2 below, fragments thereof, or 3′ and/or 5′ extensions thereof.

[0146] Exemplary guide RNA sequences are provided in the following Tables 1 and 2.

TABLE 1
Exemplary guide polynucleotides

| | gRNA Sequence (scaffold sequence is in bold; | |
|---|---|---|
| | lowercase 5′ “g” indicates a 5′ “G” added to the spacer | |
| Guide name | sequence that is not complementary to a target site; | |
| and | underline indicates a self-cleaving hammerhead | |
| corresponding | ribozyme) (lowercase letters “c” indicate target | SEQ ID |
| FIGS. | nucleotides for base editing) | NO: |
| 18-nt (FIGs. 4- | GAUAcUCACAAUUACAACGUUUUAGAGCUAGAAAUAGCA | 438 |
| 6) | AGUUAAAAUAAGGCUAGUCCGUUAUCAACUUGAAAAAGU | |
| | GGCACCGAGUCGGUGCUUUUUU | |
| 19-nt (FIGs. 4- | gGAUAcUCACAAUUACAACGUUUUAGAGCUAGAAAUAGC | 439 |
| 6) | AAGUUAAAAUAAGGCUAGUCCGUUAUCAACUUGAAAAAG | |
| | UGGCACCGAGUCGGUGCUUUUUU | |
| 20-nt (FIGs. 4- | GAGAUAcUCACAAUUACAACGUUUUAGAGCUAGAAAUAG | 440 |
| 6) | CAAGUUAAAAUAAGGCUAGUCCGUUAUCAACUUGAAAAA | |
| | GUGGCACCGAGUCGGUGCUUUUUU | |
| 21-nt (FIGs. 4- | gGAGAUAcUCACAAUUACAACGUUUUAGAGCUAGAAAUA | 441 |
| 6) | GCAAGUUAAAAUAAGGCUAGUCCGUUAUCAACUUGAAAA | |
| | AGUGGCACCGAGUCGGUGCUUUUUU | |
| 22-nt (FIGs. 4- | gUGAGAUACUCACAAUUACAACGUUUUAGAGCUAGAAAU | 442 |
| 6) | AGCAAGUUAAAAUAAGGCUAGUCCGUUAUCAACUUGAAA | |
| | AAGUGGCACCGAGUCGGUGCUUUUUU | |
| 23-nt (FIGs. 4- | gAUGAGAUAcUCACAAUUACAACGUUUUAGAGCUAGAAA | 443 |
| 6) | UAGCAAGUUAAAAUAAGGCUAGUCCGUUAUCAACUUGAA | |
| | AAAGUGGCACCGAGUCGGUGCUUUUUU | |
| 19-nt HRz | GUAUCUCUGAUGAGUCCGUGAGGACGAAACGAGUAAGCU | 444 |
| (FIGs. 4-6) | CGUCAGAUAcUCACAAUUACAACGUUUUAGAGCUAGAAA | |
| | UAGCAAGUUAAAAUAAGGCUAGUCCGUUAUCAACUUGAA | |
| | AAAGUGGCACCGAGUCGGUGCUUUUUU | |
| 21-nt HRz | gAUCUCACUGAUGAGUCCGUGAGGACGAAACGAGUAAGC | 445 |
| (FIGs. 4-6) | UCGUCUGAGAUAcUCACAAUUACAACGUUUUAGAGCUAG | |
| | AAAUAGCAAGUUAAAAUAAGGCUAGUCCGUUAUCAACUU | |
| | GAAAAAGUGGCACCGAGUCGGUGCUUUUUU | |
| 22-nt HRz | gUAUCUCAUCUGAUGAGUCCGUGAGGACGAAACGAGUAA | 446 |
| (FIGs. 4-6) | GCUCGUCAUGAGAUAcUCACAAUUACAACGUUUUAGAGC | |
| | UAGAAAUAGCAAGUUAAAAUAAGGCUAGUCCGUUAUCAA | |
| | CUUGAAAAAGUGGCACCGAGUCGGUGCUUUUUU | |
| 23-nt HRz | gCUCAUACUGAUGAGUCCGUGAGGACGAAACGAGUAAGC | 447 |
| (FIGs. 4-6) | UCGUCUAUGAGAUAcUCACAAUUACAACGUUUUAGAGCU | |
| | AGAAAUAGCAAGUUAAAAUAAGGCUAGUCCGUUAUCAAC | |
| | UUGAAAAAGUGGCACCGAGUCGGUGCUUUUUU | |
| 18-nt (FIG. 7) | gAcUCACAAUUACAACUGGUUUUAGAGCUAGAAAUAGCA | 448 |
| | AGUUAAAAUAAGGCUAGUCCGUUAUCAACUUGAAAAAGU | |
| | GGCACCGAGUCGGUGCUUUUUU | |
| 19-nt (FIG. 7) | gUAcUCACAAUUACAACUGGUUUUAGAGCUAGAAAUAGC | 449 |
| | AAGUUAAAAUAAGGCUAGUCCGUUAUCAACUUGAAAAAG | |
| | UGGCACCGAGUCGGUGCUUUUUU | |
| 20-nt (FIG. 7) | GAUAcUCACAAUUACAACUGGUUUUAGAGCUAGAAAUAG | 450 |
| | CAAGUUAAAAUAAGGCUAGUCCGUUAUCAACUUGAAAAA | |
| | GUGGCACCGAGUCGGUGCUUUUUU | |
| 21-nt (FIG. 7) | gGAUAcUCACAAUUACAACUGGUUUUAGAGCUAGAAAUA | 451 |
| | GCAAGUUAAAAUAAGGCUAGUCCGUUAUCAACUUGAAAA | |
| | AGUGGCACCGAGUCGGUGCUUUUUU | |
| 22-nt (FIG. 7) | GAGAUAcUCACAAUUACAACUGGUUUUAGAGCUAGAAAU | 452 |
| | AGCAAGUUAAAAUAAGGCUAGUCCGUUAUCAACUUGAAA | |
| | AAGUGGCACCGAGUCGGUGCUUUUUU | |
| 18-nt (FIG. 8) | gCAAUUACAACUGGGGCCGUUUUAGAGCUAGAAAUAGCA | 453 |
| | AGUUAAAAUAAGGCUAGUCCGUUAUCAACUUGAAAAAGU | |
| | GGCACCGAGUCGGUGCUUUUUU | |
| 19-nt (FIG. 8) | gACAAUUACAACUGGGGCCGUUUUAGAGCUAGAAAUAGC | 454 |
| | AAGUUAAAAUAAGGCUAGUCCGUUAUCAACUUGAAAAAG | |
| | UGGCACCGAGUCGGUGCUUUUUU | |
| 20-nt (FIG. 8) | gCACAAUUACAACUGGGGCCGUUUUAGAGCUAGAAAUAG | 455 |
| | CAAGUUAAAAUAAGGCUAGUCCGUUAUCAACUUGAAAAA | |
| | GUGGCACCGAGUCGGUGCUUUUUU | |
| 21-nt (FIG. 8) | gUCACAAUUACAACUGGGGCCGUUUUAGAGCUAGAAAUA | 456 |
| | GCAAGUUAAAAUAAGGCUAGUCCGUUAUCAACUUGAAAA | |
| | AGUGGCACCGAGUCGGUGCUUUUUU | |
| 22-nt (FIG. 8) | gCUCACAAUUACAACUGGGGCCGUUUUAGAGCUAGAAAU | 457 |
| | AGCAAGUUAAAAUAAGGCUAGUCCGUUAUCAACUUGAAA | |
| | AAGUGGCACCGAGUCGGUGCUUUUUU | |
| 23-nt (FIG. 8) | gACUCACAAUUACAACUGGGGCCGUUUUAGAGCUAGAAA | 458 |
| | UAGCAAGUUAAAAUAAGGCUAGUCCGUUAUCAACUUGAA | |
| | AAAGUGGCACCGAGUCGGUGCUUUUUU | |

TABLE 2
Exemplary Spacers

| Guide name | Spacer Sequence (lowercase letters | | |
|---|---|---|---|
| and | indicate target nucleotides for base | | |
| corresponding | editing) or Spacer Sequence Fused to | SEQ | |
| FIGs. | a 5′ HammerHead Ribozyme (HRz) | ID NO | PAM |
| 18-nt (FIGs. | AUACUCACAAUUACAAC | 459 | TGG |
| 4-6) | | | |
| 19-nt (FIGs. | GAUACUCACAAUUACAAC | 460 | TGG |
| 4-6) | | | |
| 20-nt (FIGs. | AGAUACUCACAAUUACAAC | 461 | TGG |
| 4-6) | | | |
| 21-nt (FIGs. | GAGAUACUCACAAUUACAAC | 462 | TGG |
| 4-6) | | | |
| 22-nt (FIGs. | UGAGAUACUCACAAUUACAAC | 463 | TGG |
| 4-6) | | | |
| 23-nt (FIGs. | AUGAGAUACUCACAAUUACAAC | 464 | TGG |
| 4-6) | | | |
| 19-nt HRz | UAUCUCUGAUGAGUCCGUGAGGACGAAACG | 465 | TGG |
| (FIGs. 4-6) | AGUAAGCUCGUCAGAUACUCACAAUUACAA | | |
| | C | | |
| 21-nt HRz | AUCUCACUGAUGAGUCCGUGAGGACGAAAC | 466 | TGG |
| (FIGs. 4-6) | GAGUAAGCUCGUCUGAGAUACUCACAAUUA | | |
| | CAAC | | |
| 22-nt HRz | UAUCUCAUCUGAUGAGUCCGUGAGGACGAA | 467 | TGG |
| (FIGs. 4-6) | ACGAGUAAGCUCGUCAUGAGAUACUCACAA | | |
| | UUACAAC | | |
| 23-nt HRz | CUCAUACUGAUGAGUCCGUGAGGACGAAAC | 468 | TGG |
| (FIGs. 4-6) | GAGUAAGCUCGUCUAUGAGAUACUCACAAU | | |
| | UACAAC | | |
| 18-nt (FIG. 7) | AcUCACAAUUACAACUG | 469 | GGG |
| 19-nt (FIG. 7) | UACUCACAAUUACAACUG | 470 | GGG |
| 20-nt (FIG. 7) | AUACUCACAAUUACAACUG | 471 | GGG |
| 21-nt (FIG. 7) | GAUACUCACAAUUACAACUG | 472 | GGG |
| 22-nt (FIG. 7) | AGAUACUCACAAUUACAACUG | 473 | GGG |
| 18-nt (FIG. 8) | CAAUUACAACUGGGGCC | 474 | AGG |
| 19-nt (FIG. 8) | ACAAUUACAACUGGGGCC | 475 | AGG |
| 20-nt (FIG. 8) | CACAAUUACAACUGGGGCC | 476 | AGG |
| 21-nt (FIG. 8) | UCACAAUUACAACUGGGGCC | 477 | AGG |
| 22-nt (FIG. 8) | CUCACAAUUACAACUGGGGCC | 478 | AGG |
| 23-nt (FIG. 8) | ACUCACAAUUACAACUGGGGCC | 479 | AGG |

### Nucleobase Editors

[0147] Useful in the methods and compositions described herein are nucleobase editors that edit, modify or alter a target nucleotide sequence of a polynucleotide. Nucleobase editors described herein typically include a polynucleotide programmable nucleotide binding domain and a nucleobase editing domain (e.g., adenosine deaminase, cytidine deaminase, or a dual deaminase). A polynucleotide programmable nucleotide binding domain, when in conjunction with a bound guide polynucleotide (e.g., gRNA), can specifically bind to a target polynucleotide sequence and thereby localize the base editor to the target nucleic acid sequence desired to be edited.

### Polynucleotide Programmable Nucleotide Binding Domain

[0148] Polynucleotide programmable nucleotide binding domains bind polynucleotides (e.g., RNA, DNA). A polynucleotide programmable nucleotide binding domain of a base editor can itself comprise one or more domains (e.g., one or more nuclease domains). In some embodiments, the nuclease domain of a polynucleotide programmable nucleotide binding domain comprises an endonuclease or an exonuclease.

[0149] Disclosed herein are base editors comprising a polynucleotide programmable nucleotide binding domain comprising all or a portion (e.g., a functional portion) of a CRISPR protein (i.e., a base editor comprising as a domain all or a portion (e.g., a functional portion) of a CRISPR protein (e.g., a Cas protein), also referred to as a “CRISPR protein-derived domain” of the base editor). A CRISPR protein-derived domain incorporated into a base editor can be modified compared to a wild-type or natural version of the CRISPR protein. A CRISPR protein-derived domain can comprise one or more mutations, insertions, deletions, rearrangements and/or recombinations relative to a wild-type or natural version of the CRISPR protein.

[0150] Cas proteins that can be used herein include class 1 and class 2. Non-limiting examples of Cas proteins include Cas1, Cas1B, Cas2, Cas3, Cas4, Cas5, Cas5d, Cas5t, Cas5h, Cas5a, Cas6, Cas7, Cas8, Cas9 (also known as Csn1 or Csx12), Cas10, Csy1, Csy2, Csy3, Csy4, Cse1, Cse2, Cse3, Cse4, Cse5e, Csc1, Csc2, Csa5, Csn1, Csn2, Csm1, Csm2, Csm3, Csm4, Csm5, Csm6, Cmr1, Cmr3, Cmr4, Cmr5, Cmr6, Csb1, Csb2, Csb3, Csx17, Csx14, Csx10, Csx16, CsaX, Csx3, Csx1, Csx1S, Csf1, Csf2, CsO, Csf4, Csd1, Csd2, Cst1, Cst2, Csh1, Csh2, Csa1, Csa2, Csa3, Csa4, Csa5, Cas12a/Cpf1, Cas12b/C2c1 (e.g., SEQ ID NO: 232), Cas12c/C2c3, Cas12d/CasY, Cas12e/CasX, Cas12g, Cas12h, Cas12i, and Cas12j/CasΦ, CARF, DinG, homologues thereof, or modified versions thereof. A CRISPR enzyme can direct cleavage of one or both strands at a target sequence, such as within a target sequence and/or within a complement of a target sequence. For example, a CRISPR enzyme can direct cleavage of one or both strands within about 1, 2, 3, 4, 5, 6, 7, 8, 9, 10, 15, 20, 25, 50, 100, 200, 500, or more base pairs from the first or last nucleotide of a target sequence.

[0151] A vector that encodes a CRISPR enzyme that is mutated to with respect to a corresponding wild-type enzyme such that the mutated CRISPR enzyme lacks the ability to cleave one or both strands of a target polynucleotide containing a target sequence can be used. A Cas protein (e.g., Cas9, Cas12) or a Cas domain (e.g., Cas9, Cas12) can refer to a polypeptide or domain with at least or at least about 50%, 60%, 70%, 80%, 90%, 91%, 92%, 93%, 94%, 95%, 96%, 97%, 98%, 99%, or 100% sequence identity and/or sequence homology to a wild-type exemplary Cas polypeptide or Cas domain. Cas (e.g., Cas9, Cas12) can refer to the wild-type or a modified form of the Cas protein that can comprise an amino acid change such as a deletion, insertion, substitution, variant, mutation, fusion, chimera, or any combination thereof.

[0152] In some embodiments, a CRISPR protein-derived domain of a base editor can include all or a portion (e.g., a functional portion) of Cas9 from Corynebacterium ulcerans (NCBI Refs: NC_015683.1, NC_017317.1); Corynebacterium diphtheria (NCBI Refs: NC_016782.1, NC_016786.1); Spiroplasma syrphidicola (NCBI Ref: NC_021284.1); Prevotella intermedia (NCBI Ref: NC_017861.1); Spiroplasma taiwanense (NCBI Ref: NC_021846.1); Streptococcus iniae (NCBI Ref: NC_021314.1); Belliella baltica (NCBI Ref: NC_018010.1); Psychroflexus torquis (NCBI Ref: NC_018721.1); Streptococcus thermophilus (NCBI Ref: YP_820832.1); Listeria innocua (NCBI Ref: NP_472073.1); Campylobacter jejuni (NCBI Ref: YP_002344900.1); Neisseria meningitidis (NCBI Ref: YP_002342100.1), Streptococcus pyogenes, or Staphylococcus aureus.

[0153] Some aspects of the disclosure provide high fidelity Cas9 domains. High fidelity Cas9 domains are known in the art and described, for example, in Kleinstiver, B. P., et al. “High-fidelity CRISPR-Cas9 nucleases with no detectable genome-wide off-target effects. “Nature 529, 490-495 (2016); and Slaymaker, I. M., et al. “Rationally engineered Cas9 nucleases with improved specificity.” Science 351, 84-88 (2015); the entire contents of each of which are incorporated herein by reference. An exemplary high fidelity Cas9 domain is provided in the Sequence Listing as SEQ ID NO: 233.

[0154] In some embodiments, any of the Cas9 fusion proteins or complexes provided herein comprise one or more of a D10A, N497X, a R661X, a Q695X, and/or a Q926X mutation, or a corresponding mutation in any of the amino acid sequences provided herein, wherein X is any amino acid.

[0155] Typically, Cas9 proteins, such as Cas9 from S. pyogenes (spCas9), require a “protospacer adjacent motif (PAM)” or PAM-like motif, which is a 2-6 base pair DNA sequence immediately following the DNA sequence targeted by the Cas9 nuclease in the CRISPR bacterial adaptive immune system. The presence of an NGG PAM sequence is required to bind a particular nucleic acid region, where the “N” in “NGG” is adenosine (A), thymidine (T), or cytosine (C), and the G is guanosine. In some embodiments, any of the fusion proteins or complexes provided herein may contain a Cas9 domain that is capable of binding a nucleotide sequence that does not contain a canonical (e.g., NGG) PAM sequence. Cas9 domains that bind to non-canonical PAM sequences have been described in the art and would be apparent to the skilled artisan. For example, Cas9 domains that bind non-canonical PAM sequences have been described in Kleinstiver, B. P., et al., “Engineered CRISPR-Cas9 nucleases with altered PAM specificities” Nature 523, 481-485 (2015); and Kleinstiver, B. P., et al., “Broadening the targeting range of Staphylococcus aureus CRISPR-Cas9 by modifying PAM recognition” Nature Biotechnology 33, 1293-1298 (2015); the entire contents of each are hereby incorporated by reference.

[0156] In some embodiments, the napDNAbp is a circular permutant (e.g., SEQ ID NO: 238).

[0157] In some embodiments, the polynucleotide programmable nucleotide binding domain comprises a nickase domain. Herein the term “nickase” refers to a polynucleotide programmable nucleotide binding domain comprising a nuclease domain that is capable of cleaving only one strand of the two strands in a duplexed nucleic acid molecule (e.g., DNA). For example, where a polynucleotide programmable nucleotide binding domain comprises a nickase domain derived from Cas9, the Cas9-derived nickase domain can include a D10A mutation and a histidine at position 840. In another example, a Cas9-derived nickase domain comprises an H840A mutation, while the amino acid residue at position 10 remains a D.

[0158] In some embodiments, a Cas9 nuclease has an inactive (e.g., an inactivated) DNA cleavage domain, that is, the Cas9 is a nickase, referred to as an “nCas9” protein (for “nickase” Cas9; SEQ ID NO: 201). The Cas9 nickase may be a Cas9 protein that is capable of cleaving only one strand of a duplexed nucleic acid molecule (e.g., a duplexed DNA molecule). In some embodiments the Cas9 nickase comprises an amino acid sequence that is at least 60%, at least 65%, at least 70%, at least 75%, at least 80%, at least 85%, at least 90%, at least 95%, at least 96%, at least 97%, at least 98%, at least 99%, or at least 99.5% identical to any one of the Cas9 nickases provided herein. Additional suitable Cas9 nickases will be apparent to those of skill in the art based on this disclosure and knowledge in the field and are within the scope of this disclosure.

[0159] Also provided herein are base editors comprising a polynucleotide programmable nucleotide binding domain which is catalytically dead (i.e., incapable of cleaving a target polynucleotide sequence). For example, in the case of a base editor comprising a Cas9 domain, the Cas9 can comprise both a D10A mutation and an H840A mutation. In further embodiments, a catalytically dead polynucleotide programmable nucleotide binding domain comprises a point mutation (e.g., D10A or H840A) as well as a deletion of all or a portion (e.g., a functional portion) of a nuclease domain. dCas9 domains are known in the art and described, for example, in Qi et al., “Repurposing CRISPR as an RNA-guided platform for sequence-specific control of gene expression.” Cell. 2013; 152(5):1173-83, the entire contents of which are incorporated herein by reference.

[0160] The term “protospacer adjacent motif (PAM)” or PAM-like motif refers to a 2-6 base pair DNA sequence immediately following the DNA sequence targeted by a nucleic acid programmable DNA binding protein. In some embodiments, the PAM can be a 5′ PAM (i.e., located upstream of the 5′ end of the protospacer). In other embodiments, the PAM can be a 3′ PAM (i.e., located downstream of the 5′ end of the protospacer). The PAM sequence can be any PAM sequence known in the art. Suitable PAM sequences include, but are not limited to, NGG, NGA, NGC, NGN, NGT, NGTT, NGCG, NGAG, NGAN, NGNG, NGCN, NGCG, NGTN, NNGRRT, NNNRRT, NNGRR(N), TTTV, TYCV, TYCV, TATV, NNNNGATT, NNAGAAW, or NAAAAC. Y is a pyrimidine; N is any nucleotide base; W is A or T.

[0161] A base editor provided herein can comprise a CRISPR protein-derived domain that is capable of binding a nucleotide sequence that contains a canonical or non-canonical protospacer adjacent motif (PAM) sequence.

[0162] In some embodiments, the PAM is an “NRN” PAM where the “N” in “NRN” is adenine (A), thymine (T), guanine (G), or cytosine (C), and the R is adenine (A) or guanine (G); or the PAM is an “NYN” PAM, wherein the “N” in NYN is adenine (A), thymine (T), guanine (G), or cytosine (C), and the Y is cytidine (C) or thymine (T), for example, as described in R.T. Walton et al., 2020, Science, 10.1126/science.aba8853 (2020), the entire contents of which are incorporated herein by reference.

[0163] Several PAM variants are described in Table 3 below.

TABLE 3
Cas9 proteins and corresponding PAM sequences.
N is A, C, T, or G; and V is A, C, or G.

| Variant | PAM |
|---|---|
| spCas9 | NGG |
| spCas9-VRQR | NGA |
| spCas9-VRER | NGCG |
| xCas9 (sp) | NGN |
| saCas9 | NNGRRT |
| saCas9-KKH | NNNRRT |
| spCas9-MQKSER | NGCG |
| spCas9-MQKSER | NGCN |
| spCas9-LRKIQK | NGTN |
| spCas9-LRVSQK | NGTN |
| spCas9-LRVSQL | NGTN |
| spCas9-MQKFRAER | NGC |
| Cpf1 | 5′ (TTTV) |
| SpyMac | 5′-NAA-3′ |

[0164] In some embodiments, a CRISPR protein-derived domain of a base editor comprises all or a portion (e.g., a functional portion) of a Cas9 protein with a canonical PAM sequence (NGG). In other embodiments, a Cas9-derived domain of a base editor can employ a non-canonical PAM sequence. Such sequences have been described in the art and would be apparent to the skilled artisan. For example, Cas9 domains that bind non-canonical PAM sequences have been described in Kleinstiver, B. P., et al., “Engineered CRISPR-Cas9 nucleases with altered PAM specificities” Nature 523, 481-485 (2015); and Kleinstiver, B. P., et al., “Broadening the targeting range of Staphylococcus aureus CRISPR-Cas9 by modifying PAM recognition” Nature Biotechnology 33, 1293-1298 (2015); R. T. Walton et al. “Unconstrained genome targeting with near-PAMless engineered CRISPR-Cas9 variants” Science 10.1126/science.aba8853 (2020); Hu et al. “Evolved Cas9 variants with broad PAM compatibility and high DNA specificity, “Nature, 2018 Apr. 5, 556(7699), 57-63; Miller et al., “Continuous evolution of SpCas9 variants compatible with non-G PAMs” Nat. Biotechnol., 2020 April; 38(4):471-481; the entire contents of each are hereby incorporated by reference.

Fusion Proteins or Complexes Comprising a NapDNAbp and a Cytidine Deaminase and/or Adenosine Deaminase

[0165] Some aspects of the disclosure provide fusion proteins or complexes comprising a Cas9 domain or other nucleic acid programmable DNA binding protein (e.g., Cas12) and one or more cytidine deaminase, adenosine deaminase, or cytidine adenosine deaminase domains. It should be appreciated that the Cas9 domain may be any of the Cas9 domains or Cas9 proteins (e.g., dCas9 or nCas9) provided herein. In some embodiments, any of the Cas9 domains or Cas9 proteins (e.g., dCas9 or nCas9) provided herein may be fused with any of the cytidine deaminases and/or adenosine deaminases provided herein. The domains of the base editors disclosed herein can be arranged in any order.

[0166] In some embodiments, the fusion proteins or complexes comprising a cytidine deaminase or adenosine deaminase and a napDNAbp (e.g., Cas9 or Cas12 domain) do not include a linker sequence. In some embodiments, a linker is present between the cytidine or adenosine deaminase and the napDNAbp. In some embodiments, cytidine or adenosine deaminase and the napDNAbp are fused via any of the linkers provided herein. For example, in some embodiments the cytidine or adenosine deaminase and the napDNAbp are fused via any of the linkers provided herein.

[0167] It should be appreciated that the fusion proteins or complexes of the present disclosure may comprise one or more additional features. For example, in some embodiments, the fusion protein or complex may comprise inhibitors, cytoplasmic localization sequences, export sequences, such as nuclear export sequences, or other localization sequences, as well as sequence tags that are useful for solubilization, purification, or detection of the fusion proteins or complexes. Suitable protein tags provided herein include, but are not limited to, biotin carboxylase carrier protein (BCCP) tags, myc-tags, calmodulin-tags, FLAG-tags, hemagglutinin (HA)-tags, polyhistidine tags, also referred to as histidine tags or His-tags, maltose binding protein (MBP)-tags, nus-tags, glutathione-S-transferase (GST)-tags, green fluorescent protein (GFP)-tags, thioredoxin-tags, S-tags, Softags (e.g., Softag 1, Softag 3), strep-tags, biotin ligase tags, FlAsH tags, V5 tags, and SBP-tags. Additional suitable sequences will be apparent to those of skill in the art. In some embodiments, the fusion protein or complex comprises one or more His tags.

[0168] Exemplary, yet nonlimiting, fusion proteins are described in International PCT Application Nos. PCT/US2017/045381, PCT/US2019/044935, and PCT/US2020/016288, each of which is incorporated herein by reference for its entirety.

Fusion Proteins or Complexes with Internal Insertions

[0169] Provided herein are fusion proteins or complexes comprising a heterologous polypeptide fused to a nucleic acid programmable nucleic acid binding protein, for example, a napDNAbp. The heterologous polypeptide can be fused to the napDNAbp at a C-terminal end of the napDNAbp, an N-terminal end of the napDNAbp, or inserted at an internal location of the napDNAbp. In some embodiments, the heterologous polypeptide is a deaminase (e.g., cytidine or adenosine deaminase) or a functional fragment thereof. For example, a fusion protein can comprise a deaminase flanked by an N-terminal fragment and a C-terminal fragment of a Cas9 or Cas12 (e.g., Cas12b/C2c1), polypeptide.

[0170] The deaminase can be a circular permutant deaminase. In some embodiments, the deaminase is a circular permutant TadA, circularly permutated at amino acid residue 116, 136, or 65 as numbered in a TadA reference sequence.

[0171] The fusion protein or complexes can comprise more than one deaminase. The fusion protein or complex can comprise, for example, 1, 2, 3, 4, 5 or more deaminases. The deaminases in a fusion protein or complex can be adenosine deaminases, cytidine deaminases, or a combination thereof.

[0172] In some embodiments, the napDNAbp in the fusion protein or complex contains a Cas9 polypeptide or a fragment thereof. The Cas9 polypeptide can be a variant Cas9 polypeptide. The Cas9 polypeptide can be a circularly permuted Cas9 protein.

[0173] The heterologous polypeptide (e.g., deaminase) can be inserted in the napDNAbp (e.g., Cas9 or Cas12 (e.g., Cas12b/C2c1)) at a suitable location, for example, such that the napDNAbp retains its ability to bind the target polynucleotide and a guide nucleic acid. A deaminase (e.g., adenosine deaminase, cytidine deaminase, or adenosine deaminase and cytidine deaminase (dual deaminase)) can be inserted into a napDNAbp without compromising function of the deaminase (e.g., base editing activity) or the napDNAbp (e.g. ability to bind to target nucleic acid and guide nucleic acid).

[0174] In some embodiments, the deaminase (e.g., adenosine deaminase, cytidine deaminase, or adenosine deaminase and cytidine deaminase) is inserted in regions of the Cas9 polypeptide comprising higher than average B-factors (e.g., higher B factors compared to the total protein or the protein domain comprising the disordered region). Cas9 polypeptide positions comprising a higher than average B-factor can include, for example, residues 768, 792, 1052, 1015, 1022, 1026, 1029, 1067, 1040, 1054, 1068, 1246, 1247, and 1248 as numbered in the above Cas9 reference sequence. Cas9 polypeptide regions comprising a higher than average B-factor can include, for example, residues 792-872, 792-906, and 2-791 as numbered in the above Cas9 reference sequence.

[0175] In some embodiments, a heterologous polypeptide (e.g., deaminase) is inserted in a flexible loop of a Cas9 polypeptide. The flexible loop portions can be selected from the group consisting of 530-537, 569-570, 686-691, 943-947, 1002-1025, 1052-1077, 1232-1247, or 1298-1300 as numbered in the above Cas9 reference sequence, or a corresponding amino acid residue in another Cas9 polypeptide. The flexible loop portions can be selected from the group consisting of: 1-529, 538-568, 580-685, 692-942, 948-1001, 1026-1051, 1078-1231, or 1248-1297 as numbered in the above Cas9 reference sequence, or a corresponding amino acid residue in another Cas9 polypeptide.

[0176] A heterologous polypeptide (e.g., adenine deaminase) can be inserted into a Cas9 polypeptide region corresponding to amino acid residues: 1017-1069, 1242-1247, 1052-1056, 1060-1077, 1002-1003, 943-947, 530-537, 568-579, 686-691, 1242-1247, 1298-1300, 1066-1077, 1052-1056, or 1060-1077 as numbered in the above Cas9 reference sequence, or a corresponding amino acid residue in another Cas9 polypeptide.

[0177] A heterologous polypeptide (e.g., adenine deaminase) can be inserted in place of a deleted region of a Cas9 polypeptide. The deleted region can correspond to an N-terminal or C-terminal portion of the Cas9 polypeptide. Exemplary internal fusions base editors are provided in Table 4A below:

TABLE 4A
Insertion loci in Cas9 proteins

| BE ID | Modification | Other ID |
|---|---|---|
| IBE001 | Cas9 TadA ins 1015 | ISLAY01 |
| IBE002 | Cas9 TadA ins 1022 | ISLAY02 |
| IBE003 | Cas9 TadA ins 1029 | ISLAY03 |
| IBE004 | Cas9 TadA ins 1040 | ISLAY04 |
| IBE005 | Cas9 TadA ins 1068 | ISLAY05 |
| IBE006 | Cas9 TadA ins 1247 | ISLAY06 |
| IBE007 | Cas9 TadA ins 1054 | ISLAY07 |
| IBE008 | Cas9 TadA ins 1026 | ISLAY08 |
| IBE009 | Cas9 TadA ins 768 | ISLAY09 |
| IBE020 | delta HNH TadA 792 | ISLAY20 |
| IBE021 | N-term fusion single TadA helix truncated 165-end | ISLAY21 |
| IBE029 | TadA-Circular Permutant116 ins1067 | ISLAY29 |
| IBE031 | TadA- Circular Permutant 136 ins1248 | ISLAY31 |
| IBE032 | TadA- Circular Permutant 136ins 1052 | ISLAY32 |
| IBE035 | delta 792-872 TadA ins | ISLAY35 |
| IBE036 | delta 792-906 TadA ins | ISLAY36 |
| IBE043 | TadA-Circular Permutant 65 ins1246 | ISLAY43 |
| IBE044 | TadA ins C-term truncate2 791 | ISLAY44 |

[0178] A heterologous polypeptide (e.g., deaminase) can be inserted within a structural or functional domain of a Cas9 polypeptide. A heterologous polypeptide (e.g., deaminase) can be inserted between two structural or functional domains of a Cas9 polypeptide. A heterologous polypeptide (e.g., deaminase) can be inserted in place of a structural or functional domain of a Cas9 polypeptide, for example, after deleting the domain from the Cas9 polypeptide. The structural or functional domains of a Cas9 polypeptide can include, for example, RuvC I, RuvC II, RuvC III, Rec1, Rec2, PI, or HNH.

[0179] A fusion protein can comprise a linker between the deaminase and the napDNAbp polypeptide. The linker can be a peptide or a non-peptide linker. For example, the linker can be an XTEN, (GGGS)ₙ (SEQ ID NO: 246), SGGSSGGS (SEQ ID NO: 330), (GGGGS)ₙ (SEQ ID NO: 247), (G)ₙ, (EAAAK)ₙ (SEQ ID NO: 248), (GGS)ₙ, SGSETPGTSESATPES (SEQ ID NO: 249). In some embodiments, the fusion protein comprises a linker between the N-terminal Cas9 fragment and the deaminase. In some embodiments, the fusion protein comprises a linker between the C-terminal Cas9 fragment and the deaminase. In some embodiments, the N-terminal and C-terminal fragments of napDNAbp are connected to the deaminase with a linker. In some embodiments, the N-terminal and C-terminal fragments are joined to the deaminase domain without a linker. In some embodiments, the fusion protein comprises a linker between the N-terminal Cas9 fragment and the deaminase but does not comprise a linker between the C-terminal Cas9 fragment and the deaminase. In some embodiments, the fusion protein comprises a linker between the C-terminal Cas9 fragment and the deaminase but does not comprise a linker between the N-terminal Cas9 fragment and the deaminase.

[0180] In some embodiments, the napDNAbp in the fusion protein or complex is a Cas12 polypeptide, e.g., Cas12b/C2c1, or a functional fragment thereof capable of associating with a nucleic acid (e.g., a gRNA) that guides the Cas12 to a specific nucleic acid sequence. The Cas12 polypeptide can be a variant Cas12 polypeptide. In other embodiments, the N- or C-terminal fragments of the Cas12 polypeptide comprise a nucleic acid programmable DNA binding domain or a RuvC domain. In other embodiments, the fusion protein contains a linker between the Cas12 polypeptide and the catalytic domain. In other embodiments, the amino acid sequence of the linker is GGSGGS (SEQ ID NO: 250) or GSSGSETPGTSESATPESSG (SEQ ID NO: 251). In other embodiments, the linker is a rigid linker. In other embodiments of the above aspects, the linker is encoded by GGAGGCTCTGGAGGAAGC (SEQ ID NO: 252) or GGCTCTTCTGGATCTGAAACACCTGGCACAAGCGAGAGCGCCACCCCTGAGAGCTCTGGC (SEQ ID NO: 253).

[0181] In other embodiments, the fusion protein or complex contains a nuclear localization signal (e.g., a bipartite nuclear localization signal). In other embodiments, the amino acid sequence of the nuclear localization signal is MAPKKKRKVGIHGVPAA (SEQ ID NO: 261). In other embodiments of the above aspects, the nuclear localization signal is encoded by the following sequence: ATGGCCCCAAAGAAGAAGCGGAAGGTCGGTATCCACGGAGTCCCAGCAGCC (SEQ ID NO: 262). In other embodiments, the Cas12b polypeptide contains a mutation that silences the catalytic activity of a RuvC domain. In other embodiments, the Cas12b polypeptide contains D574A, D829A and/or D952A mutations.

[0182] In some embodiments, the fusion protein or complex comprises a napDNAbp domain (e.g., Cas12-derived domain) with an internally fused nucleobase editing domain (e.g., all or a portion (e.g., a functional portion) of a deaminase domain, e.g., an adenosine deaminase domain). In some embodiments, the napDNAbp is a Cas12b. In some embodiments, the base editor comprises a BhCas12b domain with an internally fused TadA*8 domain inserted at the loci provided in Table 4B below.

TABLE 4B
Insertion loci in Cas12b proteins

| | Insertion site | Inserted between aa |
|---|---|---|
| BhCas12b | | |
| position 1 | 153 | PS |
| position 2 | 255 | KE |
| position 3 | 306 | DE |
| position 4 | 980 | DG |
| position 5 | 1019 | KL |
| position 6 | 534 | FP |
| position 7 | 604 | KG |
| position 8 | 344 | HF |
| BvCas12b | | |
| position 1 | 147 | PD |
| position 2 | 248 | GG |
| position 3 | 299 | PE |
| position 4 | 991 | GE |
| position 5 | 1031 | KM |
| AaCas12b | | |
| position 1 | 157 | PG |
| position 2 | 258 | VG |
| position 3 | 310 | DP |
| position 4 | 1008 | GE |
| position 5 | 1044 | GK |

[0183] In some embodiments, the base editing system described herein is an ABE with TadA inserted into a Cas9. Polypeptide sequences of relevant ABEs with TadA inserted into a Cas9 are provided in the attached Sequence Listing as SEQ ID NOs: 263-308.

[0184] Exemplary, yet nonlimiting, fusion proteins are described in International PCT Application Nos. PCT/US2020/016285 and U.S. Provisional Application Nos. 62/852,228 and 62/852,224, the contents of which are incorporated by reference herein in their entireties.

### A to G Editing

[0185] In some embodiments, a base editor described herein comprises an adenosine deaminase domain. Such an adenosine deaminase domain of a base editor can facilitate the editing of an adenine (A) nucleobase to a guanine (G) nucleobase by deaminating the A to form inosine (I), which exhibits base pairing properties of G. In some embodiments, an A-to-G base editor further comprises an inhibitor of inosine base excision repair, for example, a uracil glycosylase inhibitor (UGI) domain or a catalytically inactive inosine specific nuclease. Without wishing to be bound by any particular theory, the UGI domain or catalytically inactive inosine specific nuclease can inhibit or prevent base excision repair of a deaminated adenosine residue (e.g., inosine), which can improve the activity or efficiency of the base editor.

[0186] A base editor comprising an adenosine deaminase can act on any polynucleotide, including DNA, RNA and DNA-RNA hybrids. In an embodiment an adenosine deaminase domain of a base editor comprises all or a portion (e.g., a functional portion) of an ADAT comprising one or more mutations which permit the ADAT to deaminate a target A in DNA. For example, the base editor can comprise all or a portion (e.g., a functional portion) of an ADAT from Escherichia coli (EcTadA) comprising one or more of the following mutations: D108N, A106V, D147Y, E155V, L84F, H123Y, I156F, or a corresponding mutation in another adenosine deaminase. Exemplary ADAT homolog polypeptide sequences are provided in the Sequence Listing as SEQ ID NOs: 1 and 309-315.

[0187] The adenosine deaminase can be derived from any suitable organism (e.g., E. coli). In some embodiments, the adenosine deaminase is from Escherichia coli, Staphylococcus aureus, Salmonella typhi, Shewanella putrefaciens, Haemophilus influenzae, Caulobacter crescentus, or Bacillus subtilis. In some embodiments, the adenine deaminase is a naturally-occurring adenosine deaminase that includes one or more mutations corresponding to any of the mutations provided herein (e.g., mutations in ecTadA). The corresponding residue in any homologous protein can be identified by e.g., sequence alignment and determination of homologous residues. The mutations in any naturally-occurring adenosine deaminase (e.g., having homology to ecTadA) that correspond to any of the mutations described herein (e.g., any of the mutations identified in ecTadA) can be generated accordingly.

[0188] In some embodiments, the adenosine deaminase comprises an amino acid sequence that is at least 60%, at least 65%, at least 70%, at least 75%, at least 80%, at least 85%, at least 90%, at least 95%, at least 96%, at least 97%, at least 98%, at least 99%, or at least 99.5% identical to any one of the amino acid sequences set forth in any of the adenosine deaminases provided herein. It should be appreciated that adenosine deaminases provided herein may include one or more mutations (e.g., any of the mutations provided herein). The disclosure provides any deaminase domains with a certain percent identify plus any of the mutations or combinations thereof described herein. In some embodiments, the adenosine deaminase comprises an amino acid sequence that has 1, 2, 3, 4, 5, 6, 7, 8, 9, 10, 11, 12, 13, 14, 15, 16, 17, 18, 19, 20, 21, 22, 21, 24, 25, 26, 27, 28, 29, 30, 31, 32, 33, 34, 35, 36, 37, 38, 39, 40, 41, 42, 43, 44, 45, 46, 47, 48, 49, 50, or more mutations compared to a reference sequence, or any of the adenosine deaminases provided herein.

[0189] It should be appreciated that any of the mutations provided herein (e.g., based on a TadA reference sequence, such as TadA*7.10 (SEQ ID NO: 1)) can be introduced into other adenosine deaminases, such as E. coli TadA (ecTadA), S. aureus TadA (saTadA), or other adenosine deaminases (e.g., bacterial adenosine deaminases). In some embodiments, the TadA reference sequence is TadA*7.10 (SEQ ID NO: 1). It would be apparent to the skilled artisan that additional deaminases may similarly be aligned to identify homologous amino acid residues that can be mutated as provided herein. Thus, any of the mutations identified in a TadA reference sequence can be made in other adenosine deaminases (e.g., ecTada) that have homologous amino acid residues. It should also be appreciated that any of the mutations provided herein can be made individually or in any combination in a TadA reference sequence or another adenosine deaminase.

[0190] In some embodiments, the adenosine deaminase comprises an alteration or set of alterations selected from those listed in Tables 5A-5E below:

TABLE 5A
Adenosine Deaminase Variants. Residue positions in the E. coli TadA variant
(TadA*) are indicated.

| | 23 | 26 | 36 | 37 | 48 | 49 | 51 | 72 | 84 | 87 | 106 | 108 | 123 | 125 | 142 | 146 | 147 | 152 | 155 | 156 | 157 | 161 |
|---|---|---|---|---|---|---|---|---|---|---|---|---|---|---|---|---|---|---|---|---|---|---|
| TadA*0.1 | M | R | H | N | P | | R | N | L | S | A | D | H | G | A | S | D | R | E | I | K | K |
| TadA*0.2 | W | R | H | N | P | | R | N | L | S | A | D | H | G | A | S | D | R | E | I | K | K |
| TadA*1.1 | W | R | H | N | P | | R | N | L | S | A | N | H | G | A | S | D | R | E | I | K | K |
| TadA*1.2 | W | R | H | N | P | | R | N | L | S | V | N | H | G | A | S | D | R | E | I | K | K |
| TadA*2.1 | W | R | H | N | P | | R | N | L | S | V | N | H | G | A | S | Y | R | V | I | K | K |
| TadA*2.2 | W | R | H | N | P | | R | N | L | S | V | N | H | G | A | S | Y | R | V | I | K | K |
| TadA*2.3 | W | R | H | N | P | | R | N | L | S | V | N | H | G | A | S | Y | R | V | I | K | K |
| TadA*2.4 | W | R | H | N | P | | R | N | L | S | V | N | H | G | A | S | Y | R | V | I | K | K |
| TadA*2.5 | W | R | H | N | P | | R | N | T | S | V | N | H | G | A | S | Y | R | V | I | K | K |
| TadA*2.6 | W | R | H | N | P | | R | N | L | S | V | N | H | G | A | S | Y | R | V | I | K | K |
| TadA*2.7 | W | R | H | N | P | | R | N | L | S | V | N | H | G | A | S | Y | R | V | I | K | K |
| TadA*2.8 | W | R | H | N | P | | R | N | L | S | V | N | H | G | A | S | Y | R | V | I | K | K |
| TadA*2.9 | W | R | H | N | P | | R | N | L | S | V | N | H | G | A | S | Y | R | V | I | K | K |
| TadA*2.10 | W | R | H | N | P | | R | N | L | S | V | N | H | G | A | S | Y | R | V | I | K | K |
| TadA*2.11 | W | R | H | N | P | | R | N | L | S | V | N | H | G | A | S | Y | R | V | I | K | K |
| TadA*2.12 | W | R | H | N | P | | R | N | L | S | V | N | H | G | A | S | Y | R | V | I | K | K |
| TadA*3.1 | W | R | H | N | P | | R | N | F | S | V | N | Y | G | A | S | Y | R | V | F | K | K |
| TadA*3.2 | W | R | H | N | P | | R | N | F | S | V | N | Y | G | A | S | Y | R | V | F | K | K |
| TadA*3.3 | W | R | H | N | P | | R | N | F | S | V | N | Y | G | A | S | Y | R | V | F | K | K |
| TadA*3.4 | W | R | H | N | P | | R | N | F | S | V | N | Y | G | A | S | Y | R | V | F | K | K |
| TadA*3.5 | W | R | H | N | P | | R | N | F | S | V | N | Y | G | A | S | Y | R | V | F | K | K |
| TadA*3.6 | W | R | H | N | P | | R | N | F | S | V | N | Y | G | A | S | Y | R | V | F | K | K |
| TadA*3.7 | W | R | H | N | P | | R | N | F | S | V | N | Y | G | A | S | Y | R | V | F | K | K |
| TadA*3.8 | W | R | H | N | P | | R | N | F | S | V | N | Y | G | A | S | Y | R | V | F | K | K |
| TadA*4.1 | W | R | H | N | P | | R | N | L | S | V | N | H | G | N | S | Y | R | V | I | K | K |
| TadA*4.2 | W | G | H | N | P | | R | N | L | S | V | N | H | G | N | S | Y | R | V | I | K | K |
| TadA*4.3 | W | R | H | N | P | | R | N | F | S | V | N | Y | G | N | S | Y | R | V | F | K | K |
| TadA*5.1 | W | R | L | N | P | | L | N | F | S | V | N | Y | G | A | C | Y | R | V | F | N | K |
| TadA*5.2 | W | R | H | S | P | | R | N | F | S | V | N | Y | G | A | S | Y | R | V | F | K | T |
| TadA*5.3 | W | R | L | N | P | | L | N | I | S | V | N | Y | G | A | C | Y | R | V | F | N | K |
| TadA*5.4 | W | R | H | S | P | | R | N | F | S | V | N | Y | G | A | S | Y | R | V | F | K | T |
| TadA*5.5 | W | R | L | N | P | | L | N | F | S | V | N | Y | G | A | C | Y | R | V | F | N | K |
| TadA*5.6 | W | R | L | N | P | | L | N | F | S | V | N | Y | G | A | C | Y | R | V | F | N | K |
| TadA*5.7 | W | R | T | N | P | | L | N | F | S | V | N | Y | G | A | C | Y | R | V | F | N | K |
| TadA*5.8 | W | R | L | N | P | | L | N | F | S | V | N | Y | G | A | C | Y | R | V | F | N | K |
| TadA*5.9 | W | R | L | N | P | | L | N | F | S | V | N | Y | G | A | C | Y | R | V | F | N | K |
| TadA*5.10 | W | R | L | N | P | | L | N | F | S | V | N | Y | G | A | C | Y | R | V | F | N | K |
| TadA*5.11 | W | R | L | N | P | | L | N | F | S | V | N | Y | G | A | C | Y | R | V | F | N | K |
| TadA*5.12 | W | R | L | N | P | | L | N | F | S | V | N | Y | G | A | C | Y | R | V | F | N | K |
| TadA*5.13 | W | R | H | N | P | | L | D | F | S | V | N | Y | A | A | S | Y | R | V | F | K | K |
| TadA*5.14 | W | R | H | N | S | | L | N | F | C | V | N | Y | G | A | S | Y | R | V | F | K | K |
| TadA*6.1 | W | R | H | N | S | | L | N | F | S | V | N | Y | G | N | S | Y | R | V | F | K | K |
| TadA*6.2 | W | R | H | N | T | V | L | N | F | S | V | N | Y | G | N | S | Y | R | V | F | N | K |
| TadA*6.3 | W | R | L | N | S | | L | N | F | S | V | N | Y | G | A | C | Y | R | V | F | N | K |
| TadA*6.4 | W | R | L | N | S | | L | N | F | S | V | N | Y | G | N | C | Y | R | V | F | N | K |
| TadA*6.5 | W | R | L | N | T | V | L | N | F | S | V | N | Y | G | A | C | Y | R | V | F | N | K |
| TadA*6.6 | W | R | L | N | T | V | L | N | F | S | V | N | Y | G | N | C | Y | R | V | F | N | K |
| TadA*7.1 | W | R | L | N | A | | L | N | F | S | V | N | Y | G | A | C | Y | R | V | F | N | K |
| TadA*7.2 | W | R | L | N | A | | L | N | F | S | V | N | Y | G | N | C | Y | R | V | F | N | K |
| TadA*7.3 | L | R | L | N | A | | L | N | F | S | V | N | Y | G | A | C | Y | R | V | F | N | K |
| TadA*7.4 | R | R | L | N | A | | L | N | F | S | V | N | Y | G | A | C | Y | R | V | F | N | K |
| TadA*7.5 | W | R | L | N | A | | L | N | F | S | V | N | Y | G | A | C | Y | H | V | F | N | K |
| TadA*7.6 | W | R | L | N | A | | L | N | I | S | V | N | Y | G | A | C | Y | P | V | F | N | K |
| TadA*7.7 | L | R | L | N | A | | L | N | F | S | V | N | Y | G | A | C | Y | P | V | F | N | K |
| TadA*7.8 | L | R | L | N | A | | L | N | F | S | V | N | Y | G | N | C | Y | R | V | F | N | K |
| TadA*7.9 | L | R | L | N | A | | L | N | F | S | V | N | Y | G | N | C | Y | P | V | F | N | K |
| TadA*7.10 | R | R | L | N | A | | L | N | F | S | V | N | Y | G | A | C | Y | P | V | F | N | K |

TABLE 5B
Adenosine Deaminase Variants. Residue positions in the E. coli TadA variant
(TadA*) are indicated. Alterations are referenced to TadA*7.10 (first row).

| | 23 | 36 | 48 | 51 | 76 | 82 | 84 | 106 | 108 | 123 | 146 | 147 | 152 | 154 | 155 | 156 | 157 | 166 |
|---|---|---|---|---|---|---|---|---|---|---|---|---|---|---|---|---|---|---|
| TadA*7.10 | R | L | A | L | I | V | F | V | N | Y | C | Y | P | Q | V | F | N | T |
| TadA*8.1-m | | | | | | | | | | | | T | | | | | | |
| TadA*8.2-m | | | | | | | | | | | | R | | | | | | |
| TadA*8.3-m | | | | | | | | | | | | | | S | | | | |
| TadA*8.4-m | | | | | | | | | | H | | | | | | | | |
| TadA*8.5-m | | | | | | S | | | | | | | | | | | | |
| TadA*8.6-m | | | | | | | | | | | | | | | | | | R |
| TadA*8.7-m | | | | | | | | | | | | | | R | | | | |
| TadA*8.8-m | | | | | | | | | | H | | R | | R | | | | |
| TadA*8.9-m | | | | | Y | | | | | | | R | | R | | | | |
| TadA*8.10-m | | | | | | | | | | | | R | | R | | | | R |
| TadA*8.11-m | | | | | | | | | | | | T | | R | | | | |
| TadA*8.12-m | | | | | | | | | | | | T | | S | | | | |
| TadA*8.13-m | | | | | Y | | | | | H | | R | | R | | | | |
| TadA*8.14-m | | | | | Y | S | | | | | | | | | | | | |
| TadA*8.15-m | | | | | | S | | | | | | R | | | | | | |
| TadA*8.16-m | | | | | | S | | | | H | | R | | | | | | |
| TadA*8.17-m | | | | | | S | | | | | | | | R | | | | |
| TadA*8.18-m | | | | | | S | | | | H | | | | R | | | | |
| TadA*8.19-m | | | | | | S | | | | H | | R | | R | | | | |
| TadA*8.20-m | | | | | Y | S | | | | H | | R | | R | | | | |
| TadA*8.21-m | | | | | | | | | | | | R | | S | | | | |
| TadA*8.22-m | | | | | | S | | | | | | | | S | | | | |
| TadA*8.23-m | | | | | | S | | | | H | | | | | | | | |
| TadA*8.24-m | | | | | | S | | | | H | | T | | | | | | |
| TadA*8.1-d | | | | | | | | | | | | T | | | | | | |
| TadA*8.2-d | | | | | | | | | | | | R | | | | | | |
| TadA*8.3-d | | | | | | | | | | | | | | S | | | | |
| TadA*8.4-d | | | | | | | | | | H | | | | | | | | |
| TadA*8.5-d | | | | | | S | | | | | | | | | | | | |
| TadA*8.6-d | | | | | | | | | | | | | | | | | | R |
| TadA*8.7-d | | | | | | | | | | | | | | R | | | | |
| TadA*8.8-d | | | | | | | | | | H | | R | | R | | | | |
| TadA*8.9-d | | | | | Y | | | | | | | R | | R | | | | |
| TadA*8.10-d | | | | | | | | | | | | R | | R | | | | R |
| TadA*8.11-d | | | | | | | | | | | | T | | R | | | | |
| TadA*8.12-d | | | | | | | | | | | | T | | S | | | | |
| TadA*8.13-d | | | | | Y | | | | | H | | R | | R | | | | |
| TadA*8.14-d | | | | | Y | S | | | | | | | | | | | | |
| TadA*8.15-d | | | | | | S | | | | | | R | | | | | | |
| TadA*8.16-d | | | | | | S | | | | H | | R | | | | | | |
| TadA*8.17-d | | | | | | S | | | | | | | | R | | | | |
| TadA*8.18-d | | | | | | S | | | | H | | | | R | | | | |
| TadA*8.19-d | | | | | | S | | | | H | | R | | R | | | | |
| TadA*8.20-d | | | | | Y | S | | | | H | | R | | R | | | | |
| TadA*8.21-d | | | | | | | | | | | | R | | S | | | | |
| TadA*8.22-d | | | | | | S | | | | | | | | S | | | | |
| TadA*8.23-d | | | | | | S | | | | H | | | | | | | | |
| TadA*8.24-d | | | | | | S | | | | H | | T | | | | | | |

TABLE 5C
Adenosine Deaminase Variants. Alterations are referenced
to TadA*7.10. Additional details of TadA*9 adenosine
deaminases are described in International PCT Application
No. PCT/US2020/049975, which is incorporated herein
by reference in its entirety for all purposes.

| TadA*9 | |
|---|---|
| Description | Alterations |
| TadA*9.1 | E25F, V82S, Y123H, T133K, Y147R, Q154R |
| TadA*9.2 | E25F, V82S, Y123H, Y147R, Q154R |
| TadA*9.3 | V82S, Y123H, P124W, Y147R, Q154R |
| TadA*9.4 | L51W, V82S, Y123H, C146R, Y147R, Q154R |
| TadA*9.5 | P54C, V82S, Y123H, Y147R, Q154R |
| TadA*9.6 | Y73S, V82S, Y123H, Y147R, Q154R |
| TadA*9.7 | N38G, V82T, Y123H, Y147R, Q154R |
| TadA*9.8 | R23H, V82S, Y123H, Y147R, Q154R |
| TadA*9.9 | R21N, V82S, Y123H, Y147R, Q154R |
| TadA*9.10 | V82S, Y123H, Y147R, Q154R, A158K |
| TadA*9.11 | N72K, V82S, Y123H, D139L, Y147R, Q154R, |
| TadA*9.12 | E25F, V82S, Y123H, D139M, Y147R, Q154R |
| TadA*9.13 | M70V, V82S, M94V, Y123H, Y147R, Q154R |
| TadA*9.14 | Q71M, V82S, Y123H, Y147R, Q154R |
| TadA*9.15 | E25F, V82S, Y123H, T133K, Y147R, Q154R |
| TadA*9.16 | E25F, V82S, Y123H, Y147R, Q154R |
| TadA*9.17 | V82S, Y123H, P124W, Y147R, Q154R |
| TadA*9.18 | L51W, V82S, Y123H, C146R, Y147R, Q154R |
| TadA*9.19 | P54C, V82S, Y123H, Y147R, Q154R |
| TadA*9.2 | Y73S, V82S, Y123H, Y147R, Q154R |
| TadA*9.21 | N38G, V82T, Y123H, Y147R, Q154R |
| TadA*9.22 | R23H, V82S, Y123H, Y147R, Q154R |
| TadA*9.23 | R21N, V82S, Y123H, Y147R, Q154R |
| TadA*9.24 | V82S, Y123H, Y147R, Q154R, A158K |
| TadA*9.25 | N72K, V82S, Y123H, D139L, Y147R, Q154R, |
| TadA*9.26 | E25F, V82S, Y123H, D139M, Y147R, Q154R |
| TadA*9.27 | M70V, V82S, M94V, Y123H, Y147R, Q154R |
| TadA*9.28 | Q71M, V82S, Y123H, Y147R, Q154R |
| TadA*9.29 | E25F_I76Y_V82S_Y123H_Y147R_Q154R |
| TadA*9.30 | I76Y_V82T_Y123H_Y147R_Q154R |
| TadA*9.31 | N38G_I76Y_V82S_Y123H_Y147R_Q154R |
| TadA*9.32 | N38G_I76Y_V82T_Y123H_Y147R_Q154R |
| TadA*9.33 | R23H_I76Y_V82S_Y123H_Y147R_Q154R |
| TadA*9.34 | P54C_I76Y_V82S_Y123H_Y147R_Q154R |
| TadA*9.35 | R21N_I76Y_V82S_Y123H_Y147R_Q154R |
| TadA*9.36 | I76Y_V82S_Y123H_D138M_Y147R_Q154R |
| TadA*9.37 | Y72S_I76Y_V82S_Y123H_Y147R_Q154R |
| TadA*9.38 | E25F_I76Y_V82S_Y123H_Y147R_Q154R |
| TadA*9.39 | I76Y_V82T_Y123H_Y147R_Q154R |
| TadA*9.40 | N38G_I76Y_V82S_Y123H_Y147R_Q154R |
| TadA*9.41 | N38G_I76Y_V82T_Y123H_Y147R_Q154R |
| TadA*9.42 | R23H_I76Y_V82S_Y123H_Y147R_Q154R |
| TadA*9.43 | P54C_I76Y_V82S_Y123H_Y147R_Q154R |
| TadA*9.44 | R21N_I76Y_V82S_Y123H_Y147R_Q154R |
| TadA*9.45 | I76Y_V82S_Y123H_D138M_Y147R_Q154R |
| TadA*9.46 | Y72S_I76Y_V82S_Y123H_Y147R_Q154R |
| TadA*9.47 | N72K_V82S, Y123H, Y147R, Q154R |
| TadA*9.48 | Q71M_V82S, Y123H, Y147R, Q154R |
| TadA*9.49 | M70V, V82S, M94V, Y123H, Y147R, Q154R |
| TadA*9.50 | V82S, Y123H, T133K, Y147R, Q154R |
| TadA*9.51 | V82S, Y123H, T133K, Y147R, Q154R, A158K |
| TadA*9.52 | M70V, Q71M, N72K, V82S, Y123H, Y147R, Q154R |
| TadA*9.53 | N72K_V82S, Y123H, Y147R, Q154R |
| TadA*9.54 | Q71M_V82S, Y123H, Y147R, Q154R |
| TadA*9.55 | M70V, V82S, M94V, Y123H, Y147R, Q154R |
| TadA*9.56 | V82S, Y123H, T133K, Y147R, Q154R |
| TadA*9.57 | V82S, Y123H, T133K, Y147R, Q154R, A158K |
| TadA*9.58 | M70V, Q71M, N72K, V82S, Y123H, Y147R, Q154R |

[0191] In some embodiments, the adenosine deaminase comprises one or more of M1I, S2A, S2E, W4D, W4E, V4M, F6S, H8E, H8Y, E9Y, M12S, R13H, R13I, R13Y, T17L, T17S, L18A, L18E, A19N, R21N, K20K, K20R, R21A, G22P, W23), R23H, W23G, W23Q, W23L, W23R, D24E, D24G, E25F, E25M, E25D, E25A, E25G, E25R, E25V, E25S, E25Y, R26D, R26E, R26G, R26N, R26Q, R26C, R26L, R26K, R26W, E27V, E27D, P29V, V30G, L34S, L34V, L36H, H36L, H36N, N37N, N37T, N37S, N38G, N38R, W45A, W45L, W45N, N46N, R46W, R46F, R46Q, R46M, R47A, R47Q, R47F, R47K, R47P, R47W, R47M, P48T, P48L, P48A, P48I, P48S, I49G, I49H, I49V, I49F, I49H, G50L, R51H, R51L, R51N, L51W, R51Y, H52D, H52Y, D53P, P54C, P54T, A55H, T55A, A56E, A56S, E59A, E59G, E591, E59Q, E59W, M61A, M61I, M61L, M61V, L63S, L63V, Q65V, G66C, G67D, G67L, G67V, L68Q, M70H, M70Q, L84F, M70V, M70L, E70A, M70V, Q71M, Q71N, Q71L, Q71R, N72A, N72K, N72S, N72D, N72Y, Y73G, Y73I, Y73K, Y73R, Y73S, R74A, R74Q, R74G, R74K, R74L, R74N, I76D, I76F, I76I, I76N, I76T, I76Y, D77G, A78I, T79M, L80M, L80Y, V82A, V82S, V82G, V82T, L84E, L84F, L84Y, E85K, E85G, E85P, E85S, S87C, S87L, S87V, V88A, V88M, C90S, A91A, A91G, A91S, A91V, A91T, G92T, A93I, M94A, M94V, M94L, M94I, M94H, I95S, I95G, I95L, I95H, I95V, H96A, H96L, H96R, H96S, S97C, S97G, S97I, S97M, S97R, S97S, R98K, R98I, R98N, R98Q, G100R, G100V, R101V, R101R, V102A, V102F, V102I, V102V, D103A, F104G, D104N, F104V, F104I, F104L, A106T, V106Q, V106F, V106W, V106M, A106A, A106Q, A106F, A106G, A106W, A106M, A106V, A106R, R107C, R107G, R107P, R107K, R107A, R107N, R107W, R107H, R107S, D108N, D108F, D108G, D108V, D108A, D108Y, D108H, D108I, D108K, D108L, D108M, D108Q, N108Q, N108F, N108W, N108M, N108K, D108K, D108F, D108M, D108Q, D108R, D108W, D108S, A109H, A109K, A109R, A109S, A109T, A109V, K110G, K110H, K110I, K110R, K110T, T111A, T111G, T111H, T111R, G112A, A114G, A114H, A114V, G115S, L117M, L117N, L117V, M118D, M118G, M118K, M118N, M118V, D119L, D119N, D119S, D119V, V120H, V120L, H122H, H122N, H122P, H122R, H122S, H122Y, H123C, H123G, H123P, H123V, H123Y, Y123H, P124G, P1241, P124L, P124W, G125H, G125I, G125A, G125M, G125K, M126D, M126H, M126K, M126I, M126N, M126O, M126S, M126Y, N127H, N127S, N127D, N127K, N127R, H128R, R129H, R129Q, R129V, R129I, R129E, R129V, I132I, I132F, T133V, T133E, T133G, T133K, E134A, E134E, E134G, E134I, G135G, G135V, I136G, I136L, I136T, I137A, I137D, I137E, L137M, I137S, A138D, A138E, A138G, S138A, A138N, A138S, A138T, A138V, A138Y, D139E, D1391, D139C, D139L, D139M, E140A, E140C, E140L, E140R, A142N, A142D, A142G, A142A, A142L, A142S, A142T, A142N, A142S, A142V, A143D, A143E, A143G, A143D, A143G, A143E, A143L, A143W, A143M, A143S, A143Q, A143R, C146R, S146A, S146C, S146D, S146F, S146R, S146T, D147D, D147L, D147F, D147G, D147Y, Y147T, Y147R, Y147D, D147R, F148L, F148F, F148R, F148Y, F149C, F149M, F149R, F149Y, M151F, M151P, M151R, M151V, R152C, R152F, R152H, R152P, R152R, R153C, R153Q, R153R, R153V, Q154E, Q154H, Q154M, Q154R, Q154L, Q154S, Q154V, E155F, E155G, E155I, E155K, E155P, E155V, E155D, I156A, I156F, I156D, I156K, I156N, I156R, I156Y, E157A, E157F, E157I, E157P, E157T, E157V, N157K, K157N, K157R, A158Q, A158K, A158V, Q159F, Q159K, Q159L, Q159N, K160A, K160S, K160E, K160K, K160N, K161I, K161A, K161N, K161Q, K161S, K161T, A162D, A162Q, R162H, R162P, A162S, Q163G, Q163H, Q163N, Q163R, S1641, S164R, S164Y, S165A, S165D, S165I, S165T, S165Y, T166D, T166K, T166I, T166N, T166P, T166R, D167S and/or D167N mutation in a TadA reference sequence (e.g., TadA*7.10,ecTadA, or TadA8e), and any alternative mutation at the corresponding position, or any substitution from R26, W23, E27, H36, R47, P48, R51, H52, R74, I76, V82, V88, M94, I95, H96, A106, D108, A109, K110, T111, A114, D119, H122, H123, M126, N127, A142, S146, D147, F149, R152, Q154, E155, I156, E157, K161, T166, and/or D167, with respect to a TadA reference sequence, or a substitution of 2-50 amino acids in a TadA reference sequence, which may be selected from W23R, E27D, H36L, R47K, P48A, R51H, R51L, I76F, I76Y, V82S, A106V, D108G, A109S, K110R, T111H, A114V, D119N, H122R, H122N, H123Y, M126I, N127K, S146C, D147R, R152P, Q154R, E155V, I156F, K157N, K161N, T166I, and D167N, or one or more corresponding mutations in another adenosine deaminase. Additional mutations are described in U.S. Patent Application Publication No. 2022/0307003 A1 and International Patent Application Publications No. WO 2023/288304 A2 and WO 2023/034959 A2, the disclosures of which are incorporated herein by reference in their entirety for all purposes.

[0192] In embodiments, a variant of TadA*7.10 comprises one or more alterations selected from any of those alterations provided herein.

[0193] In particular embodiments, an adenosine deaminase heterodimer comprises a TadA*8 domain and an adenosine deaminase domain selected from Staphylococcus aureus (S. aureus) TadA, Bacillus subtilis (B. subtilis) TadA, Salmonella typhimurium (S. typhimurium) TadA, Shewanella putrefaciens (S. putrefaciens) TadA, Haemophilus influenzae F3031 (H influenzae) TadA, Caulobacter crescentus (C. crescentus) TadA, Geobacter sulfurreducens (G. sulfurreducens) TadA, or TadA*7.10.

[0194] In some embodiments, the TadA*8 is a variant as shown in Table 5D. Table 5D shows certain amino acid position numbers in the TadA amino acid sequence and the amino acids present in those positions in the TadA-7.10 adenosine deaminase. Table 5D also shows amino acid changes in TadA variants relative to TadA-7.10 following phage-assisted non-continuous evolution (PANCE) and phage-assisted continuous evolution (PACE), as described in M. Richter et al., 2020, Nature Biotechnology, doi.org/10.1038/s41587-020-0453-z, the entire contents of which are incorporated by reference herein. In some embodiments, the TadA*8 is TadA*8a, TadA*8b, TadA*8c, TadA*8d, or TadA*8e. In some embodiments, the TadA*8 is TadA*8e. In one embodiment, an adenosine deaminase is a TadA*8 that comprises or consists essentially of SEQ ID NO: 316 or a fragment thereof having adenosine deaminase activity.

TABLE 5D
Select TadA*8 Variants

| | | TadA amino acid number | | | | | | | | | |
|---|---|---|---|---|---|---|---|---|---|---|---|
| | TadA | 26 | 88 | 109 | 111 | 119 | 122 | 147 | 149 | 166 | 167 |
| | TadA-7.10 | R | V | A | T | D | H | Y | F | T | D |
| PANCE 1 | | | | | R | | | | | | |
| PANCE 2 | | | | S/T | R | | | | | | |
| PACE | TadA-8a | C | | S | R | N | N | D | Y | I | N |
| | TadA-8b | | A | S | R | N | N | | Y | I | N |
| | TadA-8c | C | | S | R | N | N | | Y | I | N |
| | TadA-8d | | A | | R | N | | | Y | | |
| | TadA-8e | | | S | R | N | N | D | Y | I | N |

[0195] In some embodiments, the TadA variant is a variant as shown in Table 5E. Table 5E shows certain amino acid position numbers in the TadA amino acid sequence and the amino acids present in those positions in the TadA*7.10 adenosine deaminase. In some embodiments, the TadA variant is MSP605, MSP680, MSP823, MSP824, MSP825, MSP827, MSP828, or MSP829. In some embodiments, the TadA variant is MSP828. In some embodiments, the TadA variant is MSP829.

TABLE 5E
TadA Variants

| | TadA Amino Acid Number | | | | | | | |
|---|---|---|---|---|---|---|---|---|
| Variant | 36 | 76 | 82 | 147 | 149 | 154 | 157 | 167 |
| TadA-7.10 | L | I | V | Y | F | Q | N | D |
| MSP605 | | | G | T | | S | | |
| MSP680 | | Y | G | T | | S | | |
| MSP823 | H | | G | T | | S | K | |
| MSP824 | | | G | D | Y | S | | N |
| MSP825 | H | | G | D | Y | S | K | N |
| MSP827 | H | Y | G | T | | S | K | |
| MSP828 | | Y | G | D | Y | S | | N |
| MSP829 | H | Y | G | D | Y | S | K | N |

[0196] In particular embodiments, the fusion proteins or complexes comprise a single (e.g., provided as a monomer) TadA* (e.g., TadA*8 or TadA*9). Throughout the present disclosure, an adenosine deaminase base editor that comprises a single TadA* domain is indicates using the terminology ABEm or ABE #m, where “#” is an identifying number (e.g., ABE8.20m), where “m” indicates “monomer.” In some embodiments, the TadA* is linked to a Cas9 nickase. In some embodiments, the fusion proteins or complexes of the invention comprise as a heterodimer of a wild-type TadA (TadA(wt)) linked to a TadA*. Throughout the present disclosure, an adenosine deaminase base editor that comprises a single TadA* domain and a TadA(wt) domain is indicates using the terminology ABEd or ABE #d, where “#” is an identifying number (e.g., ABE8.20d), where “d” indicates “dimer.” In other embodiments, the fusion proteins or complexes of the invention comprise as a heterodimer of a TadA*7.10 linked to a TadA*. In some embodiments, the base editor is ABE8 comprising a TadA* variant monomer. In some embodiments, the base editor is ABE comprising a heterodimer of a TadA* and a TadA(wt). In some embodiments, the base editor is ABE comprising a heterodimer of a TadA* and TadA*7.10. In some embodiments, the base editor is ABE comprising a heterodimer of a TadA*. In some embodiments, the TadA* is selected from Tables 5A-5E.

[0197] In some embodiments, the adenosine deaminase is expressed as a monomer. In other embodiments, the adenosine deaminase is expressed as a heterodimer. In some embodiments, the deaminase or other polypeptide sequence lacks a methionine, for example when included as a component of a fusion protein. This can alter the numbering of positions. However, the skilled person will understand that such corresponding mutations refer to the same mutation.

[0198] Any of the mutations provided herein and any additional mutations (e.g., based on the ecTadA amino acid sequence) can be introduced into any other adenosine deaminases. Any of the mutations provided herein can be made individually or in any combination in a TadA reference sequence or another adenosine deaminase (e.g., ecTadA).

[0199] Details of A to G nucleobase editing proteins are described in International PCT Application No. PCT/US2017/045381 (WO2018/027078) and Gaudelli, N.M., et al., “Programmable base editing of A⋅T to G⋅C in genomic DNA without DNA cleavage” Nature, 551, 464-471 (2017), the entire contents of which are hereby incorporated by reference.

### C to T Editing

[0200] In some embodiments, a base editor disclosed herein comprises a fusion protein or complex comprising cytidine deaminase capable of deaminating a target cytidine (C) base of a polynucleotide to produce uridine (U), which has the base pairing properties of thymine. In some embodiments, for example where the polynucleotide is double-stranded (e.g., DNA), the uridine base can then be substituted with a thymidine base (e.g., by cellular repair machinery) to give rise to a C:G to a T:A transition. In other embodiments, deamination of a C to U in a nucleic acid by a base editor cannot be accompanied by substitution of the U to a T.

[0201] The deamination of a target C in a polynucleotide to give rise to a U is a non-limiting example of a type of base editing that can be executed by a base editor described herein. In another example, a base editor comprising a cytidine deaminase domain can mediate conversion of a cytosine (C) base to a guanine (G) base. For example, a U of a polynucleotide produced by deamination of a cytidine by a cytidine deaminase domain of a base editor can be excised from the polynucleotide by a base excision repair mechanism (e.g., by a uracil DNA glycosylase (UDG) domain), producing an abasic site. The nucleobase opposite the abasic site can then be substituted (e.g., by base repair machinery) with another base, such as a C, by for example a translesion polymerase. Although it is typical for a nucleobase opposite an abasic site to be replaced with a C, other substitutions (e.g., A, G or T) can also occur.

[0202] Accordingly, in some embodiments a base editor described herein comprises a deamination domain (e.g., cytidine deaminase domain) capable of deaminating a target C to a U in a polynucleotide. Further, as described below, the base editor can comprise additional domains which facilitate conversion of the U resulting from deamination to, in some embodiments, a T or a G. For example, a base editor comprising a cytidine deaminase domain can further comprise a uracil glycosylase inhibitor (UGI) domain to mediate substitution of a U by a T, completing a C-to-T base editing event. In another example, the base editor can comprise a uracil stabilizing protein as described herein. In another example, a base editor can incorporate a translesion polymerase to improve the efficiency of C-to-G base editing, since a translesion polymerase can facilitate incorporation of a C opposite an abasic site (i.e., resulting in incorporation of a G at the abasic site, completing the C-to-G base editing event).

[0203] A base editor comprising a cytidine deaminase as a domain can deaminate a target C in any polynucleotide, including DNA, RNA and DNA-RNA hybrids.

[0204] In some embodiments, a cytidine deaminase of a base editor comprises all or a portion (e.g., a functional portion) of an apolipoprotein B mRNA editing complex (APOBEC) family deaminase. APOBEC is a family of evolutionarily conserved cytidine deaminases. Members of this family are C-to-U editing enzymes. The N-terminal domain of APOBEC like proteins is the catalytic domain, while the C-terminal domain is a pseudocatalytic domain. More specifically, the catalytic domain is a zinc dependent cytidine deaminase domain and is important for cytidine deamination. APOBEC family members include APOBEC1, APOBEC2, APOBEC3A, APOBEC3B, APOBEC3C, APOBEC3D (“APOBEC3E” now refers to this), APOBEC3F, APOBEC3G, APOBEC3H, APOBEC4, and Activation-induced (cytidine) deaminase.

[0205] Other exemplary deaminases that can be fused to Cas9 according to aspects of this disclosure are provided below. In embodiments, the deaminases are activation-induced deaminases (AID). It should be understood that, in some embodiments, the active domain of the respective sequence can be used, e.g., the domain without a localizing signal (nuclear localization sequence, without nuclear export signal, cytoplasmic localizing signal).

[0206] Some aspects of the present disclosure are based on the recognition that modulating the deaminase domain catalytic activity of any of the fusion proteins or complexes described herein, for example by making point mutations in the deaminase domain, affect the processivity of the fusion proteins (e.g., base editors) or complexes. For example, mutations that reduce, but do not eliminate, the catalytic activity of a deaminase domain within a base editing fusion protein or complexes can make it less likely that the deaminase domain will catalyze the deamination of a residue adjacent to a target residue, thereby narrowing the deamination window. The ability to narrow the deamination window can prevent unwanted deamination of residues adjacent to specific target residues, which can decrease or prevent off-target effects.

[0207] In some embodiments, an APOBEC deaminase incorporated into a base editor can comprise one or more mutations selected from the group consisting of H121R, H122R, R126A, R126E, R118A, W90A, W90Y, and R132E of rAPOBEC1; D316R, D317R, R320A, R320E, R313A, W285A, W285Y, and R326E of hAPOBEC3G; and any alternative mutation at the corresponding position, or one or more corresponding mutations in another APOBEC deaminase.

[0208] A number of modified cytidine deaminases are commercially available, including, but not limited to, SaBE3, SaKKH-BE3, VQR-BE3, EQR-BE3, VRER-BE3, YE1-BE3, EE-BE3, YE2-BE3, and YEE-BE3, which are available from Addgene (plasmids 85169, 85170, 85171, 85172, 85173, 85174, 85175, 85176, 85177). In some embodiments, a deaminase incorporated into a base editor comprises all or a portion (e.g., a functional portion) of an APOBEC1 deaminase.

[0209] In some embodiments, the fusion proteins or complexes of the invention comprise one or more cytidine deaminase domains. In some embodiments, the cytidine deaminases provided herein are capable of deaminating cytosine or 5-methylcytosine to uracil or thymine. In some embodiments, the cytidine deaminases provided herein are capable of deaminating cytosine in DNA. The cytidine deaminase may be derived from any suitable organism. In some embodiments, the cytidine deaminase is a naturally-occurring cytidine deaminase that includes one or more mutations corresponding to any of the mutations provided herein. One of skill in the art will be able to identify the corresponding residue in any homologous protein, e.g., by sequence alignment and determination of homologous residues. Accordingly, one of skill in the art would be able to generate mutations in any naturally-occurring cytidine deaminase that corresponds to any of the mutations described herein. In some embodiments, the cytidine deaminase is from a prokaryote. In some embodiments, the cytidine deaminase is from a bacterium. In some embodiments, the cytidine deaminase is from a mammal (e.g., human).

[0210] In some embodiments, the cytidine deaminase comprises an amino acid sequence that is at least 60%, at least 65%, at least 70%, at least 75%, at least 80%, at least 85%, at least 90%, at least 95%, at least 96%, at least 97%, at least 98%, at least 99%, or at least 99.5% identical to any one of the cytidine deaminase amino acid sequences set forth herein. It should be appreciated that cytidine deaminases provided herein may include one or more mutations (e.g., any of the mutations provided herein). Some embodiments provide a polynucleotide molecule encoding the cytidine deaminase nucleobase editor polypeptide of any previous aspect or as delineated herein. In some embodiments, the polynucleotide is codon optimized.

[0211] In embodiments, a fusion protein of the invention comprises two or more nucleic acid editing domains.

[0212] Details of C to T nucleobase editing proteins are described in International PCT Application No. PCT/US2016/058344 (WO2017/070632) and Komor, A. C., et al., “Programmable editing of a target base in genomic DNA without double-stranded DNA cleavage” Nature 533, 420-424 (2016), the entire contents of which are hereby incorporated by reference.

### Cytidine Adenosine Base Editors (CABEs)

[0213] In some embodiments, a base editor described herein comprises an adenosine deaminase variant that has increased cytidine deaminase activity. Such base editors may be referred to as “cytidine adenosine base editors (CABEs)” or “cytosine base editors derived from TadA* (CBE-Ts),” and their corresponding deaminase domains may be referred to as “TadA* acting on DNA cytosine (TADC)” domains. In some instances, an adenosine deaminase variant has both adenine and cytosine deaminase activity (i.e., is a dual deaminase). In some embodiments, the adenosine deaminase variants deaminate adenine and cytosine in DNA. In some embodiments, the adenosine deaminase variants deaminate adenine and cytosine in single-stranded DNA. In some embodiments, the adenosine deaminase variants deaminate adenine and cytosine in RNA. In some embodiments, the adenosine deaminase variant predominantly deaminates cytosine in DNA and/or RNA (e.g., greater than 30%, 40%, 50%, 60%, 70%, 80%, 90%, 95%, or 99% of all deaminations catalyzed by the adenosine deaminase variant, or the number of cytosine deaminations catalyzed by the variant is about or at least about 2-fold, 3-fold, 4-fold, 5-fold, 6-fold, 7-fold, 8-fold, 9-fold, 10-fold, 25-fold, 50-fold, 75-fold, 100-fold, 500-fold, or 1,000-fold greater than the number adenine deaminations catalyzed by the variant). In some embodiments, the adenosine deaminase variant has approximately equal cytosine and adenosine deaminase activity (e.g., the two activities are within about 10% or 20% of each other). In some embodiments, the adenosine deaminase variant has predominantly cytosine deaminase activity, and little, if any, adenosine deaminase activity. In some embodiments, the adenosine deaminase variant has cytosine deaminase activity, and no significant or no detectable adenosine deaminase activity. In some embodiments, the target polynucleotide is present in a cell in vitro or in vivo. In some embodiments, the cell is a bacteria, yeast, fungi, insect, plant, or mammalian cell.

[0214] In some embodiments, the CABE comprises a bacterial TadA deaminase variant (e.g., ecTadA). In some embodiments, the CABE comprises a truncated TadA deaminase variant. In some embodiments, the CABE comprises a fragment of a TadA deaminase variant. In some embodiments, the CABE comprises a TadA*8.20 variant.

[0215] In some embodiments, an adenosine deaminase variant of the invention is a TadA adenosine deaminase comprising one or more alterations that increase cytosine deaminase activity (e.g., at least about 10-fold, 20-fold, 30-fold, 40-fold, 50-fold, 60-fold, 70-fold or more increase) while maintaining adenosine deaminase activity (e.g., at least about 30%, 40%, 50% or more of the activity of a reference adenosine deaminase (e.g., TadA*8.20 or TadA*8.19)). In some instances, the adenosine deaminase variant comprises one or more alterations that increase cytosine deaminase activity (e.g., at least about 10-fold, 20-fold, 30-fold, 40-fold, 50-fold, 60-fold, 70-fold or more increase) relative to the activity of a reference adenosine deaminase and comprise undetectable adenosine deaminase activity or adenosine deaminase activity that is less than 30%, 20%, 10%, or 5% of that of a reference adenosine deaminase. In some embodiments, the reference adenosine deaminase is TadA*8.20 or TadA*8.19.

[0216] In some embodiments, the adenosine deaminase variant is an adenosine deaminase comprising two or more alterations at an amino acid position selected from the group consisting of 2, 4, 6, 8, 13, 17, 23, 27, 29, 30, 47, 48, 49, 67, 76, 77, 82, 84, 96, 100, 107, 112, 114, 115, 118, 119, 122, 127, 142, 143, 147, 149, 158, 159, 162 165, 166, and 167, of an amino acid sequence having at least about 70%, 75%, 80%, 85%, 90%, 95%, 98%, 99% or greater identity to SEQ ID NO: 1, or a corresponding alteration in another deaminase. I In some embodiments, the adenosine deaminase variant is an adenosine deaminase comprising one or more alterations selected from the group consisting of S2H, V4K, V4S, V4T, V4Y, F6G, F6H, F6Y, H8Q, R13G, T17A, T17W, R23Q, E27C, E27G, E27H, E27K, E27Q, E27S, E27G, P29A, P29G, P29K, V30F, V30I, R47G, R47S, A48G, I49K, I49M, I49N, I49Q, I49T, G67W, I76H, I76R, I76W, Y76H, Y76R, Y76W, F84A, F84M, H96N, G100A, G100K, T111H, G112H, A114C, G115M, M118L, H122G, H122R, H122T, N127I, N127K, N127P, A142E, R147H, A158V, Q159S, A162C, A162N, A162Q, and S165P of an amino acid sequence having at least about 70%, 75%, 80%, 85%, 90%, 95%, 98%, 99% or greater identity to SEQ ID NO: 1, or a corresponding alteration in another deaminase.

[0217] In some embodiments, the adenosine deaminase variant is an adenosine deaminase comprising an amino acid alteration or combination of amino acid alterations selected from those listed in any of Tables 6A-6F.

[0218] The residue identity of exemplary adenosine deaminase variants that are capable of deaminating adenine and/or cytidine in a target polynucleotide (e.g., DNA) is provided in Tables 6A-6F below. Further examples of adenosine deaminase variants include the following variants of 1.17 (see Table 6A): 1.17+E27H; 1.17+E27K; 1.17+E27S; 1.17+E27S+I49K; 1.17+E27G; 1.17+I49N; 1.17+E27G+I49N; and 1.17+E27Q. In some embodiments, any of the amino acid alterations provided herein are substituted with a conservative amino acid. Additional mutations known in the art can be further added to any of the adenosine deaminase variants provided herein.

[0219] In some embodiments, the base editor systems comprising a CABE provided herein have at least about a 301, 408, 50%, 60%, 70% or more C to T editing activity in a target polynucleotide (e.g., DNA). In some embodiments, a base editor system comprising a CABE as provided herein has an increased C to T base editing activity (e.g., increased at least about 30-fold, 40-fold, 50-fold, 60-fold, 70-fold or more) relative to a reference base editor system comprising a reference adenosine deaminase (e.g., TadA*8.20 or TadA*8.19).

TABLE 6A
Adenosine Deaminase Variants. Mutations are indicated with reference to
TadA*8.20. “S” indicates “Surface,” and “NAS” indicates “Near Active Site.”

| location in structure | N/A | S h1 | S h1 | S h1 | NAS | NAS | NAS | NAS | | S | |
|---|---|---|---|---|---|---|---|---|---|---|---|
| Amino Acid | 2 | 8 | 13 | 17 | 27 | 47 | 48 | 49 | 67 | 76 | 77 |
| No. (*START | | | | | | | | | | | |
| Met is AA#1) | | | | | | | | | | | |
| TadA*8.20 | S | H | R | T | E | R | A | I | G | Y | D |
| TadA*8.19 | | | | | | | | | | I | |
| 1.1 | | | | | H | | | | | I | |
| 1.2 | | | | | H | | | K | | I | |
| 1.3 | | | | | S | | | K | | I | |
| 1.4 | | | | | S | | | K | | I | |
| 1.5 | | | | | K | | | | | | |
| 1.6 | | | | | K | | | | | | |
| 1.7 | | | | | H | | | | | I | |
| 1.8 | | | | | S | | | K | W | | |
| 1.9 | | | | | | | | T | W | | |
| 1.10 | | | | | C | | | | | I | |
| 1.11 | | | G | | Q | | | | | | |
| 1.12 | | | | A | H | | | M | | I | |
| 1.13 | | | | | | | | Q | | I | |
| 1.14 | H | | | | | | | K | | T | |
| 1.15 | | | | | | S | | | | | |
| 1.16 | | Q | | | | | | Q | | I | |
| 1.17 | | | | A | | | G | | | | |
| 1.18 | | | | | G | | | | | | |
| 1.19 | | | | | G | | | N | | | |
| 1.20 | | | | | G | | | | | | G |

Adenosine Deaminase Variants. Mutations are indicated with
reference to TadA*8.20. “I” indicates “Internal,” “S” indicates “Surface,” and “NAS”
indicates “Near Active Site.”

| location in structure | I | NAS | | NAS | S | | S | S | S | | S | |
|---|---|---|---|---|---|---|---|---|---|---|---|---|
| Amino Acid | 82 | 84 | 96 | 107 | 112 | 115 | 118 | 119 | 127 | 142 | 162 | 165 |
| No. (*START | | | | | | | | | | | | |
| Met is AA#1) | | | | | | | | | | | | |
| TadA*8.20 | S | F | H | R | G | G | M | D | N | A | A | S |
| TadA*8.19 | | | | | | | | | | | | |
| 1.1 | | M | | | | | | | | | | |
| 1.2 | | | | | | | | | | | | |
| 1.3 | | | | | | | | | | | | |
| 1.4 | | | | | | | | | | | N | |
| 1.5 | | | | | | | | | | | | |
| 1.6 | | | | | | | | N | | | | |
| 1.7 | | | | | | | | | | | | |
| 1.8 | | | | | | | | | | | | |
| 1.9 | | | N | | | | | | | | | |
| 1.10 | | | | | | | | N | | | | |
| 1.11 | | | | | | | | | K | | | |
| 1.12 | | | | | | | L | | | | | |
| 1.13 | | | | | | M | | | | | | |
| 1.14 | | | | | H | | | | | | | |
| 1.15 | | | | C | | | | | | | | |
| 1.16 | | | | | | | | | | | | |
| 1.17 | T | | | | | | | | | E | | |
| 1.18 | | | | | | | | | | | | |
| 1.19 | | | | | | | | | | | | |
| 1.20 | | | | | | | | | | | | P |

TABLE 6B
Adenosine deaminase variants. Mutations are indicated with
reference to TadA*8.20.

| Position No. | 27 | 29 | 30 | 49 | 82 | 84 | 107 | 112 | 115 | 142 |
|---|---|---|---|---|---|---|---|---|---|---|
| TadA*8.20 | E | P | V | I | S | F | R | G | G | A |
| Alterations | | | | | | | | | | |
| Evaluated | G/S/H | G/A/K | I/L/F | K | T | L/A | C | H | M | E |
| S1.1 | S | | | K | T | | | | | |
| S1.2 | S | | | K | T | | C | | | |
| S1.3 | S | | | K | T | | | H | | |
| S1.4 | S | | | K | T | | | | M | |
| S1.5 | S | | | K | T | | | | | E |
| S1.6 | S | | | K | T | | C | H | | |
| S1.7 | S | | | K | T | | C | | M | |
| S1.8 | S | | | K | T | | C | | | E |
| S1.9 | S | | | K | T | | | H | | E |
| S1.10 | S | | | K | T | | | | M | E |
| S1.11 | S | | | K | T | | C | H | M | E |
| S1.12 | S | | I | K | T | | | | | |
| S1.13 | S | | I | K | T | | C | | | |
| S1.14 | S | | I | K | T | | | H | | |
| S1.15 | S | | I | K | T | | | | M | |
| S1.16 | S | | I | K | T | | | | | E |
| S1.17 | S | | I | K | T | | C | H | | |
| S1.18 | S | | I | K | T | | C | | M | |
| S1.19 | S | | I | K | T | | C | | | E |
| S1.20 | S | | I | K | T | | | H | | E |
| S1.21 | S | | I | K | T | | | | M | E |
| S1.22 | S | | I | K | T | | C | H | M | E |
| S1.23 | S | | L | K | T | | | | | |
| S1.24 | S | | L | K | T | | C | | | |
| S1.25 | S | | L | K | T | | | H | | |
| S1.26 | S | | L | K | T | | | | M | |
| S1.27 | S | | L | K | T | | | | | E |
| S1.28 | S | | L | K | T | | C | H | | |
| S1.29 | S | | L | K | T | | C | | M | |
| S1.30 | S | | L | K | T | | C | | | E |
| S1.31 | S | | L | K | T | | | H | | E |
| S1.32 | S | | L | K | T | | | | M | E |
| S1.33 | S | | L | K | T | | C | H | M | E |
| S1.34 | S | | F | K | T | A | | | | |
| S1.35 | S | | F | K | T | A | C | | | |
| S1.36 | S | | F | K | T | A | | H | | |
| S1.37 | S | | F | K | T | A | | | M | |
| S1.38 | S | | F | K | T | A | | | | E |
| S1.39 | S | | F | K | T | A | C | H | | |
| S1.40 | S | | F | K | T | A | C | | M | |
| S1.41 | S | | F | K | T | A | C | | | E |
| S1.42 | S | | F | K | T | A | | H | | E |
| S1.43 | S | | F | K | T | A | | | M | E |
| S1.44 | S | | F | K | T | A | C | H | M | E |
| S1.45 | S | | | K | T | L | | | | |
| S1.46 | S | | | K | T | L | C | | | |
| S1.47 | S | | | K | T | L | | H | | |
| S1.48 | S | | | K | T | L | | | M | |
| S1.49 | S | | | K | T | L | | | | E |
| S1.50 | S | | | K | T | L | C | H | | |
| S1.51 | S | | | K | T | L | C | | M | |
| S1.52 | S | | | K | T | L | C | | | E |
| S1.53 | S | | | K | T | L | | H | | E |
| S1.54 | S | | | K | T | L | | | M | E |
| S1.55 | S | | | K | T | L | C | H | M | E |
| S1.56 | S | | I | K | T | L | | | | |
| S1.57 | S | | I | K | T | L | C | | | |
| S1.58 | S | | I | K | T | L | | H | | |
| S1.59 | S | | I | K | T | L | | | M | |
| S1.60 | S | | I | K | T | L | | | | E |
| S1.61 | S | | I | K | T | L | C | H | | |
| S1.62 | S | | I | K | T | L | C | | M | |
| S1.63 | S | | I | K | T | L | C | | | E |
| S1.64 | S | | I | K | T | L | | H | | E |
| S1.65 | S | | I | K | T | L | | | M | E |
| S1.66 | S | | I | K | T | L | C | H | M | E |
| S1.67 | S | G | | K | T | | | | | |
| S1.68 | S | G | | K | T | | C | | | |
| S1.69 | S | G | | K | T | | | H | | |
| S1.70 | S | G | | K | T | | | | M | |
| S1.71 | S | G | | K | T | | | | | E |
| S1.72 | S | G | | K | T | | C | H | | |
| S1.73 | S | G | | K | T | | C | | M | |
| S1.74 | S | G | | K | T | | C | | | E |
| S1.75 | S | G | | K | T | | | H | | E |
| S1.76 | S | G | | K | T | | | | M | E |
| S1.77 | S | G | | K | T | | C | H | M | E |
| S1.78 | | G | | K | T | | | | | |
| S1.79 | | G | | K | T | | C | | | |
| S1.80 | | G | | K | T | | | H | | |
| S1.81 | | G | | K | T | | | | M | |
| S1.82 | | G | | K | T | | | | | E |
| S1.83 | | G | | K | T | | C | H | | |
| S1.84 | | G | | K | T | | C | | M | |
| S1.85 | | G | | K | T | | C | | | E |
| S1.86 | | G | | K | T | | | H | | E |
| S1.87 | | G | | K | T | | | | M | E |
| S1.88 | | G | | K | T | | C | H | M | E |
| S1.89 | | K | | K | T | | | | | |
| S1.90 | | K | | K | T | | C | | | |
| S1.91 | | K | | K | T | | | H | | |
| S1.92 | | K | | K | T | | | | M | |
| S1.93 | | K | | K | T | | | | | E |
| S1.94 | | K | | K | T | | C | H | | |
| S1.95 | | K | | K | T | | C | | M | |
| S1.96 | | K | | K | T | | C | | | E |
| S1.97 | | K | | K | T | | | H | | E |
| S1.98 | | K | | K | T | | | | M | E |
| S1.99 | | K | | K | T | | C | H | M | E |
| S1.100 | | K | I | K | T | | | | | |
| S1.101 | | K | I | K | T | | C | | | |
| S1.102 | | K | I | K | T | | | H | | |
| S1.103 | | K | I | K | T | | | | M | |
| S1.104 | | K | I | K | T | | | | | E |
| S1.105 | | K | I | K | T | | C | H | | |
| S1.106 | | K | I | K | T | | C | | M | |
| S1.107 | | K | I | K | T | | C | | | E |
| S1.108 | | K | I | K | T | | | H | | E |
| S1.109 | | K | I | K | T | | | | M | E |
| S1.110 | | K | I | K | T | | C | H | M | E |
| S1.111 | | K | | K | T | L | | | | |
| S1.112 | | K | | K | T | L | C | | | |
| S1.113 | | K | | K | T | L | | H | | |
| S1.114 | | K | | K | T | L | | | M | |
| S1.115 | | K | | K | T | L | | | | E |
| S1.116 | | K | | K | T | L | C | H | | |
| S1.117 | | K | | K | T | L | C | | M | |
| S1.118 | | K | | K | T | L | C | | | E |
| S1.119 | | K | | K | T | L | | H | | E |
| S1.120 | | K | | K | T | L | | | M | E |
| S1.121 | | K | | K | T | L | C | H | M | E |
| S1.122 | | K | I | K | T | L | | | | |
| S1.123 | | K | I | K | T | L | C | | | |
| S1.124 | | K | I | K | T | L | | H | | |
| S1.125 | | K | I | K | T | L | | | M | |
| S1.126 | | K | I | K | T | L | | | | E |
| S1.127 | | K | I | K | T | L | C | H | | |
| S1.128 | | K | I | K | T | L | C | | M | |
| S1.129 | | K | I | K | T | L | C | | | E |
| S1.130 | | K | I | K | T | L | | H | | E |
| S1.131 | | K | I | K | T | L | | | M | E |
| S1.132 | | K | I | K | T | L | C | H | M | E |
| S1.133 | G | | | K | T | | | | | |
| S1.134 | G | | | K | T | | C | | | |
| S1.135 | G | | | K | T | | | H | | |
| S1.136 | G | | | K | T | | | | M | |
| S1.137 | G | | | K | T | | | | | E |
| S1.138 | G | | | K | T | | C | H | | |
| S1.139 | G | | | K | T | | C | | M | |
| S1.140 | G | | | K | T | | C | | | E |
| S1.141 | G | | | K | T | | | H | | E |
| S1.142 | G | | | K | T | | | | M | E |
| S1.143 | G | | | K | T | | C | H | M | E |
| S1.144 | H | | | K | T | | | | | |
| S1.145 | H | | | K | T | | C | | | |
| S1.146 | H | | | K | T | | | H | | |
| S1.147 | H | | | K | T | | | | M | |
| S1.148 | H | | | K | T | | | | | E |
| S1.149 | H | | | K | T | | C | H | | |
| S1.150 | H | | | K | T | | C | | M | |
| S1.151 | H | | | K | T | | C | | | E |
| S1.152 | H | | | K | T | | | H | | E |
| S1.153 | H | | | K | T | | | | M | E |
| S1.154 | H | | | K | T | | C | H | M | E |
| S1.155 | S | | | | T | | | | | |
| S1.156 | S | | | | T | | C | | | |
| S1.157 | S | | | | T | | | H | | |
| S1.158 | S | | | | T | | | | M | |
| S1.159 | S | | | | T | | | | | E |
| S1.160 | S | | | | T | | C | H | | |
| S1.161 | S | | | | T | | C | | M | |
| S1.162 | S | | | | T | | C | | | E |
| S1.163 | S | | | | T | | | H | | E |
| S1.164 | S | | | | T | | | | M | E |
| S1.165 | S | | | | T | | C | H | M | E |
| S1.166 | | A | | | T | | | | | |
| S1.167 | | A | | | T | | C | | | |
| S1.168 | | A | | | T | | | H | | |
| S1.169 | | A | | | T | | | | M | |
| S1.170 | | A | | | T | | | | | E |
| S1.171 | | A | | | T | | C | H | | |
| S1.172 | | A | | | T | | C | | M | |
| S1.173 | | A | | | T | | C | | | E |
| S1.174 | | A | | | T | | | H | | E |
| S1.175 | | A | | | T | | | | M | E |
| S1.176 | | A | | | T | | C | H | M | E |
| S1.177 | S | | I | | T | | | | | |
| S1.178 | S | | I | | T | | C | | | |
| S1.179 | S | | I | | T | | | H | | |
| S1.180 | S | | I | | T | | | | M | |
| S1.181 | S | | I | | T | | | | | E |
| S1.182 | S | | I | | T | | C | H | | |
| S1.183 | S | | I | | T | | C | | M | |
| S1.184 | S | | I | | T | | C | | | E |
| S1.185 | S | | I | | T | | | H | | E |
| S1.186 | S | | I | | T | | | | M | E |
| S1.187 | S | | I | | T | | C | H | M | E |
| S1.188 | | A | I | | T | L | | | | |
| S1.189 | | A | I | | T | L | C | | | |
| S1.190 | | A | I | | T | L | | H | | |
| S1.191 | | A | I | | T | L | | | M | |
| S1.192 | | A | I | | T | L | | | | E |
| S1.193 | | A | I | | T | L | C | H | | |
| S1.194 | | A | I | | T | L | C | | M | |
| S1.195 | | A | I | | T | L | C | | | E |
| S1.196 | | A | I | | T | L | | H | | E |
| S1.197 | | A | I | | T | L | | | M | E |
| S1.198 | | A | I | | T | L | C | H | M | E |
| S1.199 | S | A | L | K | T | L | | H | M | E |

TABLE 6C
Adenosine deaminase variants. Mutations are indicated with reference to
variant 1.2 (Table 6A) .

| | | Residue identity (START Met is amino | | | | | | | | |
|---|---|---|---|---|---|---|---|---|---|---|
| | | acid #1) | | | | | | | | |
| Variant Name | Alternative Variant Names | 4 | 6 | 17 | 23 | 76 | 77 | 100 | 111 | 114 |
| Reference | 1.2 (see Table 6A) | V | F | T | R | I | D | G | T | A |
| TadAC2.1 | pDKL-135; 2.1 | K | | | | | | | | C |
| TadAC2.2 | pDKL-136; 2.2 | K | | | | | G | | | |
| TadAC2.3 | pDKL-137; 2.3 | | Y | | | | | A | | |
| TadAC2.4 | pDKL-138; 2.4 | T | | | | R | | | | |
| TadAC2.5 | pDKL-139; 2.5 | | Y | | | W | | | | |
| TadAC2.6 | pDKL-140; 2.6 | | Y | | | | | | | |
| TadAC2.7 | pDKL-141; 2.7 | | Y | | | | | | | C |
| TadAC2.8 | pDKL-142; 2.8 | | Y | | | | | | | |
| TadAC2.9 | pDKL-143; 2.9 | K | | | | W | | | | |
| TadAC2.10 | pDKL-144; 2.10 | | G | | | R | | K | | |
| TadAC2.11 | pDKL-145; 2.11 | | H | | | | | | | |
| TadAC2.12 | pDKL-146; 2.12 | | | | | | | | | C |
| TadAC2.13 | pDKL-147; 2.13 | | Y | | | H | | | | |
| TadAC2.14 | pDKL-148; 2.14 | | | | | | | | | |
| TadAC2.15 | pDKL-149; 2.15 | | | | Q | R | | | | |
| TadAC2.16 | pDKL-150; 2.16 | | | | | H | | | | |
| TadAC2.17 | pDKL-151; 2.17 | | Y | | | | | | H | |
| TadAC2.18 | pDKL-152; 2.18 | | | | | W | | | | |
| TadAC2.19 | pDKL-153; 2.19 | | | | | | | | H | |
| TadAC2.20 | pDKL-154; 2.20 | | | | | | | | | |
| TadAC2.21 | pDKL-155; 2.21 | | Y | | | R | | | | |
| TadAC2.22 | pDKL-156; 2.22 | | | W | | H | | | | |
| TadAC2.23 | pDKL-157; 2.23 | S | | | | Y | | | | |
| TadAC2.24 | pDKL-158; 2.24 | | | | | | | | | |
| | | Residue identity (START Met is | | | | | | | | |
| | | amino acid #1) | | | | | | | | |
| Variant Name | Alternative Variant Names | 119 | 122 | 127 | 143 | 147 | 158 | 159 | 162 | 166 |
| Reference | 1.2 (see Table 6A) | D | H | N | A | R | A | Q | A | T |
| TadAC2.1 | pDKL-135; 2.1 | | | | | | | | | |
| TadAC2.2 | pDKL-136; 2.2 | | | | | | | | | |
| TadAC2.3 | pDKL-137; 2.3 | | R | | | | | | | |
| TadAC2.4 | pDKL-138; 2.4 | | G | | | | | | | |
| TadAC2.5 | pDKL-139; 2.5 | | | | | | | | | |
| TadAC2.6 | pDKL-140; 2.6 | N | | | | | | | | |
| TadAC2.7 | pDKL-141; 2.7 | | | | | | | | | |
| TadAC2.8 | pDKL-142; 2.8 | | | | | | | | | |
| TadAC2.9 | pDKL-143; 2.9 | | T | | | | | | | |
| TadAC2.10 | pDKL-144; 2.10 | | | | | | | | | |
| TadAC2.11 | pDKL-145; 2.11 | | N | | | | | | | |
| TadAC2.12 | pDKL-146; 2.12 | | | | | | | | | |
| TadAC2.13 | pDKL-147; 2.13 | | R | | | | | | | I |
| TadAC2.14 | pDKL-148; 2.14 | | | P | | | | | | |
| TadAC2.15 | pDKL-149; 2.15 | | | | | | | | | |
| TadAC2.16 | pDKL-150; 2.16 | | R | | | | V | | | |
| TadAC2.17 | pDKL-151; 2.17 | | | | | | | | | |
| TadAC2.18 | pDKL-152; 2.18 | | | | | | | | | |
| TadAC2.19 | pDKL-153; 2.19 | | G | | | | | | C | |
| TadAC2.20 | pDKL-154; 2.20 | | | | E | | | | | |
| TadAC2.21 | pDKL-155; 2.21 | | | | | | | | | |
| TadAC2.22 | pDKL-156; 2.22 | | G | | | | V | | | |
| TadAC2.23 | pDKL-157; 2.23 | | | | E | | | S | | |
| TadAC2.24 | pDKL-158; 2.24 | | | I | | | | | Q | |

TABLE 6D
Adenosine deaminase variants. Mutations are indicated with reference to
TadA*8.20.

| AA Positions | 6 | 27 | 49 | 76 | 77 | 82 | 107 | 112 | 114 | 115 | 119 | 122 | 127 | 142 | 143 |
|---|---|---|---|---|---|---|---|---|---|---|---|---|---|---|---|
| TadA*8.20 | F | E | I | Y | D | S | R | G | A | G | D | H | N | A | A |
| S1.154 | F | H | K | Y | D | T | C | H | | M | | | | E | |
| Alterations from Table 6C | Y | | | W | G | | | | C | | N | G | P | | E |
| S2.1 | Y | H | K | W | | T | C | H | | M | | | | E | |
| S2.2 | Y | H | K | | G | T | C | H | | M | | | | E | |
| S2.3 | Y | H | K | | | T | C | H | C | M | | | | E | |
| S2.4 | Y | H | K | | | T | C | H | | M | N | | | E | |
| S2.5 | Y | H | K | | | T | C | H | | M | | G | | E | |
| S2.6 | Y | H | K | | | T | C | H | | M | | | P | E | |
| S2.7 | Y | H | K | | | T | C | H | | M | | | | E | E |
| S2.8 | Y | H | K | | | T | C | H | | M | | | | A | E |
| S2.9 | Y | H | K | W | G | T | C | H | | M | | | | E | |
| S2.10 | Y | H | K | W | | T | C | H | C | M | | | | E | |
| S2.11 | Y | H | K | W | | T | C | H | | M | N | | | E | |
| S2.12 | Y | H | K | W | | T | C | H | | M | | G | | E | |
| S2.13 | Y | H | K | W | | T | C | H | | M | | | P | E | |
| S2.14 | Y | H | K | W | | T | C | H | | M | | | | E | E |
| S2.15 | Y | H | K | W | | T | C | H | | M | | | | A | E |
| S2.16 | Y | H | K | | G | T | C | H | C | M | | | | E | |
| S2.17 | Y | H | K | | G | T | C | H | | M | N | | | E | |
| S2.18 | Y | H | K | | G | T | C | H | | M | | G | | E | |
| S2.19 | Y | H | K | | G | T | C | H | | M | | | P | E | |
| S2.20 | Y | H | K | | G | T | C | H | | M | | | | E | E |
| S2.21 | Y | H | K | | G | T | C | H | | M | | | | A | E |
| S2.22 | Y | H | K | | | T | C | H | C | M | N | | | E | |
| S2.23 | Y | H | K | | | T | C | H | C | M | | G | | E | |
| S2.24 | Y | H | K | | | T | C | H | C | M | | | P | E | |
| S2.25 | Y | H | K | | | T | C | H | | M | N | G | | E | |
| S2.26 | Y | H | K | | | T | C | H | | M | N | | P | E | |
| S2.27 | Y | H | K | | | T | C | H | | M | | G | P | E | |
| S2.28 | Y | H | K | W | G | T | C | H | C | M | | | | E | |
| S2.29 | Y | H | K | W | G | T | C | H | | M | N | | | E | |
| S2.30 | Y | H | K | W | G | T | C | H | | M | | G | | E | |
| S2.31 | Y | H | K | W | G | T | C | H | | M | | | P | E | |
| S2.32 | Y | H | K | W | G | T | C | H | | M | | | | E | E |
| S2.33 | Y | H | K | W | G | T | C | H | | M | | | | A | E |
| S2.34 | Y | H | K | W | | T | C | H | C | M | N | | | E | |
| S2.35 | Y | H | K | W | | T | C | H | C | M | | G | | E | |
| S2.36 | Y | H | K | W | | T | C | H | C | M | | | P | E | |
| S2.37 | Y | H | K | W | | T | C | H | C | M | | | | E | E |
| S2.38 | Y | H | K | W | | T | C | H | C | M | | | | A | E |
| S2.39 | Y | H | K | W | | T | C | H | | M | N | G | | E | |
| S2.40 | Y | H | K | W | | T | C | H | | M | N | | P | E | |
| S2.41 | Y | H | K | W | | T | C | H | | M | | G | P | E | |
| S2.42 | Y | H | K | W | | T | C | H | C | M | N | G | | E | |
| S2.43 | Y | H | K | W | | T | C | H | C | M | N | | P | E | |
| S2.44 | Y | H | K | W | | T | C | H | C | M | | G | P | E | |
| S2.45 | Y | H | K | W | G | T | C | H | C | M | N | | | E | |
| S2.46 | Y | H | K | W | G | T | C | H | C | M | | G | | E | |
| S2.47 | Y | H | K | W | G | T | C | H | C | M | | | P | E | |
| S2.48 | Y | H | K | W | G | T | C | H | C | M | | | | E | E |
| S2.49 | Y | H | K | W | G | T | C | H | C | M | | | | A | E |
| S2.50 | Y | H | K | W | G | T | C | H | C | M | N | G | | E | |
| S2.51 | Y | H | K | W | G | T | C | H | C | M | N | | P | E | |
| S2.52 | Y | H | K | W | G | T | C | H | C | M | | G | P | E | |
| S2.53 | Y | H | K | W | | T | C | H | C | M | N | G | P | E | E |
| S2.54 | Y | H | K | W | | T | C | H | C | M | N | G | P | A | E |
| S2.55 | Y | H | K | W | G | T | C | H | C | M | N | G | P | E | E |
| S2.56 | Y | H | K | W | G | T | C | H | C | M | N | G | P | A | E |

TABLE 6E
Hybrid constructs. Mutations are indicated with reference to TadA*7.10.

| | TadA amino acid subsitutions | | | | | | | | | | | |
|---|---|---|---|---|---|---|---|---|---|---|---|---|
| | 76 | 82 | 109 | 111 | 119 | 122 | 123 | 147 | 149 | 154 | 166 | 167 |
| TadA*7.10 | I | V | A | T | D | H | Y | Y | F | Q | T | D |
| TadA*8e | | | S | R | N | N | | D | Y | | I | N |
| TadA*8.20 | Y | S | | | | | H | R | | R | | |
| TadA*8.17 | | S | | | | | | | | R | | |
| pNMG-B878 | Y | S | | | | | H | D | | R | | |
| pNMG-B879 | Y | S | | | | | H | R | Y | R | | |
| pNMG-B880 | Y | S | | | | | H | R | | R | I | |
| pNMG-B881 | Y | S | | | | | H | R | | R | | N |
| pNMG-B882 | Y | S | | | | | H | D | Y | R | I | N |
| pNMG-B883 | Y | S | | R | N | | H | R | | R | | |
| pNMG-B884 | Y | S | S | R | N | N | H | R | | R | | |
| pNMG-B885 | Y | S | S | | | | H | R | | R | | |
| pNMG-B886 | Y | S | | R | | | H | R | | R | | |
| pNMG-B887 | Y | S | | | N | | H | R | | R | | |
| pNMG-B888 | Y | S | | | | N | H | R | | R | | |
| pNMG-B889 | Y | S | S | R | | | H | R | | R | | |
| pNMG-B890 | Y | S | | | N | N | H | R | | R | | |
| pNMG-B891 | Y | S | S | R | N | N | H | D | Y | R | I | N |

TABLE 6F
Base editor variants. Mutations are indicated with reference to
TadA*8.19/8.20.

| AA positions: | 17 | 27 | 48 | 49 | 76 | 82 | 84 | 118 | 142 | 147 | 149 | 166 | 167 |
|---|---|---|---|---|---|---|---|---|---|---|---|---|---|
| ABE8.19 m/8.20 m | T | E | A | I | Y/I | S | F | M | A | Y | F | T | D |
| 1.1 + 8e(B879) | | H | | | I | | M | | | | Y | | |
| 1.2 + 8e(B879) | | H | | K | I | | | | | | Y | | |
| 1.12 + 8e(B879) | A | H | | M | I | | | L | | | Y | | |
| 1.17 + 8e(B879) | A | | G | | | T | | | E | | Y | | |
| 1.18 + 8e(B879) | | G | | | | | | | | | Y | | |
| 1.19 + 8e(B879) | | G | | N | | | | | | | Y | | |
| 1.1 + 8e(B882) | | H | | | I | | M | | | D | Y | I | N |
| 1.2 + 8e(B882) | | H | | K | I | | | | | D | Y | I | N |
| 1.12 + 8e(B882) | A | H | | M | I | | | L | | D | Y | I | N |
| 1.17 + 8e(B882) | A | | G | | | T | | | E | D | Y | I | N |
| 1.18 + 8e(B882) | | G | | | | | | | | D | Y | I | N |
| 1.19 + 8e(B882) | | G | | N | | | | | | D | Y | I | N |

### Guide Polynucleotides

[0220] A polynucleotide programmable nucleotide binding domain, when in conjunction with a bound guide polynucleotide (e.g., gRNA), can specifically bind to a target polynucleotide sequence (i.e., via complementary base pairing between bases of the bound guide nucleic acid and bases of the target polynucleotide sequence) and thereby localize the base editor to the target nucleic acid sequence desired to be edited. In some embodiments, the target polynucleotide sequence comprises single-stranded DNA or double-stranded DNA. In some embodiments, the target polynucleotide sequence comprises RNA. In some embodiments, the target polynucleotide sequence comprises a DNA-RNA hybrid.

[0221] In an embodiment, a guide polynucleotide described herein can be RNA or DNA. In one embodiment, the guide polynucleotide is a gRNA.

[0222] In some embodiments, the guide polynucleotide is at least one single guide RNA (“sgRNA” or “gRNA”). In some embodiments, a guide polynucleotide comprises two or more individual polynucleotides, which can interact with one another via for example complementary base pairing (e.g., a dual guide polynucleotide, dual gRNA). For example, a guide polynucleotide can comprise a CRISPR RNA (crRNA) and a trans-activating CRISPR RNA (tracrRNA) or can comprise one or more trans-activating CRISPR RNA (tracrRNA).

[0223] A guide polynucleotide may include natural or non-natural (or unnatural) nucleotides (e.g., peptide nucleic acid or nucleotide analogs). In some cases, the targeting region of a guide nucleic acid sequence (e.g., a spacer) can be at least 15, 16, 17, 18, 19, 20, 21, 22, 23, 24, 25, 26, 27, 28, 29, or 30 nucleotides in length.

[0224] In some embodiments, the methods described herein can utilize an engineered Cas protein. A guide RNA (gRNA) is a short synthetic RNA composed of a scaffold sequence necessary for Cas-binding and a user-defined ˜20 nucleotide spacer that defines the genomic target to be modified. Exemplary gRNA scaffold sequences are provided in the sequence listing as SEQ ID NOs: 317-327 and 511. Thus, a skilled artisan can change the genomic target of the Cas protein specificity is partially determined by how specific the gRNA targeting sequence is for the genomic target compared to the rest of the genome. In embodiments, the spacer is about 10, 11, 12, 13, 14, 15, 16, 17, 18, 19, 20, 22, 23, 24, 25, or more nucleotides in length. The spacer of a gRNA can be or can be about 19, 20, or 21 nucleotides in length.

[0225] A gRNA or a guide polynucleotide can target any exon or intron of a gene target. In some embodiments, a composition comprises multiple gRNAs that all target the same exon or multiple gRNAs that target different exons. An exon and/or an intron of a gene can be targeted. A gRNA or a guide polynucleotide can target a nucleic acid sequence of about 20 nucleotides or less than about 20 nucleotides (e.g., at least about 5, 10, 15, 16, 17, 18, 19, 20, 21, 22, 23, 24, 25, 30 nucleotides), or anywhere between about 1-100 nucleotides (e.g., 5, 10, 15, 16, 17, 18, 19, 20, 21, 22, 23, 24, 25, 30, 40, 50, 60, 70, 80, 90, 100). A target nucleic acid sequence can be or can be about 20 bases immediately 5′ of the first nucleotide of the PAM. A gRNA can target a nucleic acid sequence. A target nucleic acid can be at least or at least about 1-10, 1-20, 1-30, 1-40, 1-50, 1-60, 1-70, 1-80, 1-90, or 1-100 nucleotides.

[0226] The guide polynucleotides can comprise standard ribonucleotides, modified ribonucleotides (e.g., pseudouridine), ribonucleotide isomers, and/or ribonucleotide analogs.

[0227] In some embodiments, a base editor system may comprise multiple guide polynucleotides, e.g., gRNAs. For example, the gRNAs may target to one or more target loci (e.g., at least 1 gRNA, at least 2 gRNA, at least 5 gRNA, at least 10 gRNA, at least 20 gRNA, at least 30 g RNA, at least 50 gRNA) comprised in a base editor system. The multiple gRNA sequences can be tandemly arranged and are preferably separated by a direct repeat.

### Modified Polynucleotides

[0228] To enhance expression, stability, and/or genomic/base editing efficiency, and/or reduce possible toxicity, the base editor-coding sequence (e.g., mRNA) and/or the guide polynucleotide (e.g., gRNA) can be modified to include one or more modified nucleotides and/or chemical modifications, e.g. using pseudo-uridine, 5-Methyl-cytosine, 2′-O-methyl-3′-phosphonoacetate, 2′-O-methyl thioPACE (MSP), 2′-O-methyl-PACE (MP), 2′-fluoro RNA (2′-F-RNA), =constrained ethyl (S-cEt), 2′-O-methyl (‘M’), 2′-O-methyl-3′-phosphorothioate (‘MS’), 2′-O-methyl-3′-thiophosphonoacetate (‘MSP’), 5-methoxyuridine, phosphorothioate, and N1-Methylpseudouridine. Chemically protected gRNAs can enhance stability and editing efficiency in vivo and ex vivo. Methods for using chemically modified mRNAs and guide RNAs are known in the art and described, for example, by Jiang et al., Chemical modifications of adenine base editor mRNA and guide RNA expand its application scope. Nat Commun 11, 1979 (2020). doi.org/10.1038/s41467-020-15892-8, Callum et al., N1-Methylpseudouridine substitution enhances the performance of synthetic mRNA switches in cells, Nucleic Acids Research, Volume 48, Issue 6, 6 Apr. 2020, Page e35, and Andries et al., Journal of Controlled Release, Volume 217, 10 Nov. 2015, Pages 337-344, each of which is incorporated herein by reference in its entirety.

[0229] In some embodiments, the guide polynucleotide comprises one or more modified nucleotides at the 5′ end and/or the 3′ end of the guide. In some embodiments, the guide polynucleotide comprises two, three, four or more modified nucleosides at the 5′ end and/or the 3′ end of the guide. In some embodiments, the guide polynucleotide comprises two, three, four or more modified nucleosides at the 5′ end and/or the 3′ end of the guide.

[0230] In some embodiments, the guide comprises at least about 50%-75% modified nucleotides. In some embodiments, the guide comprises at least about 85% or more modified nucleotides. In some embodiments, at least about 1-5 nucleotides at the 5′ end of the gRNA are modified and at least about 1-5 nucleotides at the 3′ end of the gRNA are modified. In some embodiments, at least about 3-5 contiguous nucleotides at each of the 5′ and 3′ termini of the gRNA are modified. In some embodiments, at least about 20% of the nucleotides present in a direct repeat or anti-direct repeat are modified. In some embodiments, at least about 50% of the nucleotides present in a direct repeat or anti-direct repeat are modified. In some embodiments, at least about 50-75% of the nucleotides present in a direct repeat or anti-direct repeat are modified. In some embodiments, at least about 100 of the nucleotides present in a direct repeat or anti-direct repeat are modified. In some embodiments, at least about 20% or more of the nucleotides present in a hairpin present in the gRNA scaffold are modified. In some embodiments, at least about 50% or more of the nucleotides present in a hairpin present in the gRNA scaffold are modified. In some embodiments, the guide comprises a variable length spacer. In some embodiments, the guide comprises a 20-40 nucleotide spacer. In some embodiments, the guide comprises a spacer comprising at least about 20-25 nucleotides or at least about 30-35 nucleotides. In some embodiments, the spacer comprises modified nucleotides. In some embodiments, the guide comprises two or more of the following:
[0231] at least about 1-5 nucleotides at the 5′ end of the gRNA are modified and at least about 1-5 nucleotides at the 3′ end of the gRNA are modified;
[0232] at least about 20% of the nucleotides present in a direct repeat or anti-direct repeat are modified;
[0233] at least about 50-75% of the nucleotides present in a direct repeat or anti-direct repeat are modified;
[0234] at least about 20% or more of the nucleotides present in a hairpin present in the gRNA scaffold are modified;
[0235] a variable length spacer; and
[0236] a spacer comprising modified nucleotides.

[0237] In embodiments, the gRNA contains numerous modified nucleotides and/or chemical modifications (“heavy mods”). Such heavy mods can increase base editing ˜2 fold in vivo or in vitro. In embodiments, the gRNA comprises 2′-O-methyl or phosphorothioate modifications. In an embodiment, the gRNA comprises 2′-O-methyl and phosphorothioate modifications. In an embodiment, the modifications increase base editing by at least about 2 fold.

[0238] A guide polynucleotide can comprise one or more modifications to provide a nucleic acid with a new or enhanced feature. A guide polynucleotide can comprise a nucleic acid affinity tag. A guide polynucleotide can comprise synthetic nucleotide, synthetic nucleotide analog, nucleotide derivatives, and/or modified nucleotides.

[0239] A gRNA or a guide polynucleotide can also be modified by 5′ adenylate, 5′ guanosine-triphosphate cap, 5′ N7-Methylguanosine-triphosphate cap, 5′ triphosphate cap, 3′ phosphate, 3′ thiophosphate, 5′ phosphate, 5′ thiophosphate, Cis-Syn thymidine dimer, trimers, C12 spacer, C3 spacer, C6 spacer, dSpacer, PC spacer, rSpacer, Spacer 18, Spacer 9, 3′-3′ modifications, 2′-O-methyl thioPACE (MSP), 2′-O-methyl-PACE (MP), and constrained ethyl (S-cEt), 5′-5′ modifications, abasic, acridine, azobenzene, biotin, biotin BB, biotin TEG, cholesteryl TEG, desthiobiotin TEG, DNP TEG, DNP-X, DOTA, dT-Biotin, dual biotin, PC biotin, psoralen C2, psoralen C6, TINA, 3′ DABCYL, black hole quencher 1, black hole quencher 2, DABCYL SE, dT-DABCYL, IRDye QC-1, QSY-21, QSY-35, QSY-7, QSY-9, carboxyl linker, thiol linkers, 2′-deoxyribonucleoside analog purine, 2′-deoxyribonucleoside analog pyrimidine, ribonucleoside analog, 2′-O-methyl ribonucleoside analog, sugar modified analogs, wobble/universal bases, fluorescent dye label, 2′-fluoro RNA, 2′-O-methyl RNA, methylphosphonate, phosphodiester DNA, phosphodiester RNA, phosphothioate DNA, phosphorothioate RNA, UNA, pseudouridine-5′-triphosphate, 5′-methylcytidine-5′-triphosphate, or any combination thereof.

[0240] In some cases, a phosphorothioate enhanced RNA gRNA can inhibit RNase A, RNase T1, calf serum nucleases, or any combinations thereof. These properties can allow the use of PS-RNA gRNAs to be used in applications where exposure to nucleases is of high probability in vivo or in vitro. For example, phosphorothioate (PS) bonds can be introduced between the last 3-5 nucleotides at the 5′- or 3′-end of a gRNA which can inhibit exonuclease degradation.

[0241] In some cases, phosphorothioate bonds can be added throughout an entire gRNA to reduce attack by endonucleases.

### Fusion Proteins or Complexes Comprising a Nuclear Localization Sequence (NLS)

[0242] In some embodiments, the fusion proteins or complexes provided herein further comprise one or more (e.g., 2, 3, 4, 5) nuclear targeting sequences, for example a nuclear localization sequence (NLS). In one embodiment, a bipartite NLS is used. In some embodiments, a NLS comprises an amino acid sequence that facilitates the importation of a protein, that comprises an NLS, into the cell nucleus (e.g., by nuclear transport). In some embodiments, the NLS is fused to the N-terminus or the C-terminus of the fusion protein. In some embodiments, the NLS is fused to the C-terminus or N-terminus of an nCas9 domain or a dCas9 domain. In some embodiments, the NLS is fused to the N-terminus or C-terminus of the Cas12 domain. In some embodiments, the NLS is fused to the N-terminus or C-terminus of the cytidine or adenosine deaminase. In some embodiments, the NLS is fused to the fusion protein via one or more linkers. In some embodiments, the NLS is fused to the fusion protein without a linker. In some embodiments, the NLS comprises an amino acid sequence of any one of the NLS sequences provided or referenced herein. Additional nuclear localization sequences are known in the art and would be apparent to the skilled artisan. For example, NLS sequences are described in Plank et al., PCT/EP2000/011690, the contents of which are incorporated herein by reference for their disclosure of exemplary nuclear localization sequences.

[0243] In some embodiments, the NLS is present in a linker or the NLS is flanked by linkers, for example described herein. A bipartite NLS comprises two basic amino acid clusters, which are separated by a relatively short spacer sequence (hence bipartite—2 parts, while monopartite NLSs are not). The NLS of nucleoplasmin, KR [PAATKKAGQA]KKKK (SEQ ID NO: 191), is the prototype of the ubiquitous bipartite signal: two clusters of basic amino acids, separated by a spacer of about 10 amino acids. The sequence of an exemplary bipartite NLS follows: PKKKRKVEGADKRTADGSE FES PKKKRKV (SEQ ID NO: 328)

### Additional Domains

[0244] A base editor described herein can include any domain which helps to facilitate the nucleobase editing, modification or altering of a nucleobase of a polynucleotide. In some embodiments, a base editor comprises a polynucleotide programmable nucleotide binding domain (e.g., Cas9), a nucleobase editing domain (e.g., deaminase domain), and one or more additional domains. In some embodiments, the additional domain can facilitate enzymatic or catalytic functions of the base editor, binding functions of the base editor, or be inhibitors of cellular machinery (e.g., enzymes) that could interfere with the desired base editing result. In some embodiments, a base editor comprises a nuclease, a nickase, a recombinase, a deaminase, a methyltransferase, a methylase, an acetylase, an acetyltransferase, a transcriptional activator, or a transcriptional repressor domain.

[0245] In some embodiments, a base editor comprises an uracil glycosylase inhibitor (UGI) domain. In some cases, a base editor is expressed in a cell in trans with a UGI polypeptide. In some embodiments, cellular DNA repair response to the presence of U: G heteroduplex DNA can be responsible for a decrease in nucleobase editing efficiency in cells. In such embodiments, uracil DNA glycosylase (UDG) can catalyze removal of U from DNA in cells, which can initiate base excision repair (BER), mostly resulting in reversion of the U:G pair to a C:G pair. In such embodiments, BER can be inhibited in base editors comprising one or more domains that bind the single strand, block the edited base, inhibit UGI, inhibit BER, protect the edited base, and/or promote repairing of the non-edited strand. Thus, this disclosure contemplates a base editor fusion protein or complex comprising a UGI domain and/or a uracil stabilizing protein (USP) domain.

### Base Editor System

[0246] Provided herein are systems, compositions, and methods for editing a nucleobase using a base editor system. In some embodiments, the base editor system comprises (1) a base editor (BE) comprising a polynucleotide programmable nucleotide binding domain and a nucleobase editing domain (e.g., a deaminase domain) for editing the nucleobase; and (2) a guide polynucleotide (e.g., guide RNA) in conjunction with the polynucleotide programmable nucleotide binding domain. In some embodiments, the base editor system is a cytidine base editor (CBE) or an adenosine base editor (ABE). In some embodiments, the polynucleotide programmable nucleotide binding domain is a polynucleotide programmable DNA or RNA binding domain. In some embodiments, the nucleobase editing domain is a deaminase domain. In some embodiments, a deaminase domain can be a cytidine deaminase or an cytosine deaminase. In some embodiments, a deaminase domain can be an adenine deaminase or an adenosine deaminase. In some embodiments, the adenosine base editor can deaminate adenine in DNA. In some embodiments, the base editor is capable of deaminating a cytidine in DNA.

[0247] Use of the base editor system provided herein comprises the steps of: (a) contacting a target nucleotide sequence of a polynucleotide (e.g., double- or single stranded DNA or RNA) of a subject with a base editor system comprising a nucleobase editor (e.g., an adenosine base editor or a cytidine base editor) and a guide polynucleotide (e.g., gRNA), wherein the target nucleotide sequence comprises a targeted nucleobase pair; (b) inducing strand separation of said target region; (c) converting a first nucleobase of said target nucleobase pair in a single strand of the target region to a second nucleobase; and (d) cutting no more than one strand of said target region, where a third nucleobase complementary to the first nucleobase base is replaced by a fourth nucleobase complementary to the second nucleobase. It should be appreciated that in some embodiments, step (b) is omitted. In some embodiments, said targeted nucleobase pair is a plurality of nucleobase pairs in one or more genes. In some embodiments, the base editor system provided herein is capable of multiplex editing of a plurality of nucleobase pairs in one or more genes. In some embodiments, the plurality of nucleobase pairs is located in the same gene. In some embodiments, the plurality of nucleobase pairs is located in one or more genes, wherein at least one gene is located in a different locus.

[0248] The components of a base editor system (e.g., a deaminase domain, a guide RNA, and/or a polynucleotide programmable nucleotide binding domain) may be associated with each other covalently or non-covalently. For example, in some embodiments, the deaminase domain can be targeted to a target nucleotide sequence by a polynucleotide programmable nucleotide binding domain, optionally where the polynucleotide programmable nucleotide binding domain is complexed with a polynucleotide (e.g., a guide RNA). In some embodiments, a polynucleotide programmable nucleotide binding domain can be fused or linked to a deaminase domain. In some embodiments, a polynucleotide programmable nucleotide binding domain can target a deaminase domain to a target nucleotide sequence by non-covalently interacting with or associating with the deaminase domain. For example, in some embodiments, the nucleobase editing component (e.g., the deaminase component) comprises an additional heterologous portion or domain that is capable of interacting with, associating with, or capable of forming a complex with a corresponding heterologous portion, antigen, or domain that is part of a polynucleotide programmable nucleotide binding domain and/or a guide polynucleotide (e.g., a guide RNA) complexed therewith. In some embodiments, the polynucleotide programmable nucleotide binding domain, and/or a guide polynucleotide (e.g., a guide RNA) complexed therewith, comprises an additional heterologous portion or domain that is capable of interacting with, associating with, or capable of forming a complex with a corresponding heterologous portion, antigen, or domain that is part of a nucleobase editing domain (e.g., the deaminase component). In some embodiments, the additional heterologous portion may be capable of binding to, interacting with, associating with, or forming a complex with a polypeptide. In some embodiments, the additional heterologous portion may be capable of binding to, interacting with, associating with, or forming a complex with a polynucleotide. In some embodiments, the additional heterologous portion may be capable of binding to a guide polynucleotide. In some embodiments, the additional heterologous portion may be capable of binding to a polypeptide linker. In some embodiments, the additional heterologous portion is capable of binding to a polynucleotide linker. An additional heterologous portion may be a protein domain. In some embodiments, an additional heterologous portion comprises a polypeptide, such as a 22 amino acid RNA-binding domain of the lambda bacteriophage antiterminator protein N (N22p), a 2G12 IgG homodimer domain, an ABI, an antibody (e.g. an antibody that binds a component of the base editor system or a heterologous portion thereof) or fragment thereof (e.g. heavy chain domain 2 (CH2) of IgM (MHD2) or IgE (EHD2), an immunoglobulin Fc region, a heavy chain domain 3 (CH3) of IgG or IgA, a heavy chain domain 4 (CH4) of IgM or IgE, an Fab, an Fab2, miniantibodies, and/or ZIP antibodies), a barnase-barstar dimer domain, a Bcl-xL domain, a Calcineurin A (CAN) domain, a Cardiac phospholamban transmembrane pentamer domain, a collagen domain, a Coin RNA binding protein domain (e.g. SfMu Coin coat protein domain, and SfMu Coin binding protein domain), a Cyclophilin-Fas fusion protein (CyP-Fas) domain, a Fab domain, an Fc domain, a fibritin foldon domain, an FK506 binding protein (FKBP) domain, an FKBP binding domain (FRB) domain of mTOR, a foldon domain, a fragment X domain, a GAI domain, a GID1 domain, a Glycophorin A transmembrane domain, a GyrB domain, a Halo tag, an HIV Gp41 trimerisation domain, an HPV45 oncoprotein E7 C-terminal dimer domain, a hydrophobic polypeptide, a K Homology (KH) domain, a Ku protein domain (e.g., a Ku heterodimer), a leucine zipper, a LOV domain, a mitochondrial antiviral-signaling protein CARD filament domain, an MS2 coat protein domain (MCP), a non-natural RNA aptamer ligand that binds a corresponding RNA motif/aptamer, a parathyroid hormone dimerization domain, a PP7 coat protein (PCP) domain, a PSD95-Dlgl-zo-1 (PDZ) domain, a PYL domain, a SNAP tag, a SpyCatcher moiety, a SpyTag moiety, a streptavidin domain, a streptavidin-binding protein domain, a streptavidin binding protein (SBP) domain, a telomerase Sm7 protein domain (e.g. Sm7 homoheptamer or a monomeric Sm-like protein), and/or fragments thereof. In embodiments, an additional heterologous portion comprises a polynucleotide (e.g., an RNA motif), such as an MS2 phage operator stem-loop (e.g., an MS2, an MS2 C-5 mutant, or an MS2 F-5 mutant), a non-natural RNA motif, a PP7 operator stem-loop, an SfMu phate Com stem-loop, a steril alpha motif, a telomerase Ku binding motif, a telomerase Sm7 binding motif, and/or fragments thereof. Non-limiting examples of additional heterologous portions include polypeptides with at least about 85% sequence identity to any one or more of SEQ ID NOs: 380, 382, 384, 386-388, or fragments thereof. Non-limiting examples of additional heterologous portions include polynucleotides with at least about 85% sequence identity to any one or more of SEQ ID NOs: 379, 381, 383, 385, or fragments thereof.

[0249] In some instances, components of the base editing system are associated with one another through the interaction of leucine zipper domains (e.g., SEQ ID NOs: 387 and 388). In some cases, components of the base editing system are associated with one another through polypeptide domains (e.g., FokI domains) that associate to form protein complexes containing about, at least about, or no more than about 1, 2 (i.e., dimerize), 3, 4, 5, 6, 7, 8, 9, 10 polypeptide domain units, optionally the polypeptide domains may include alterations that reduce or eliminate an activity thereof.

[0250] In some instances, components of the base editing system are associated with one another through the interaction of multimeric antibodies or fragments thereof (e.g., IgG, IgD, IgA, IgM, IgE, a heavy chain domain 2 (CH2) of IgM (MHD2) or IgE (EHD2), an immunoglobulin Fc region, a heavy chain domain 3 (CH3) of IgG or IgA, a heavy chain domain 4 (CH4) of IgM or IgE, an Fab, and an Fab2). In some instances, the antibodies are dimeric, trimeric, or tetrameric. In embodiments, the dimeric antibodies bind a polypeptide or polynucleotide component of the base editing system.

[0251] In some cases, components of the base editing system are associated with one another through the interaction of a polynucleotide-binding protein domain(s) with a polynucleotide(s). In some instances, components of the base editing system are associated with one another through the interaction of one or more polynucleotide-binding protein domains with polynucleotides that are self-complementary and/or complementary to one another so that complementary binding of the polynucleotides to one another brings into association their respective bound polynucleotide-binding protein domain(s).

[0252] In some instances, components of the base editing system are associated with one another through the interaction of a polypeptide domain(s) with a small molecule(s) (e.g., chemical inducers of dimerization (CIDs), also known as “dimerizers”). Non-limiting examples of CIDs include those disclosed in Amara, et al., “A versatile synthetic dimerizer for the regulation of protein-protein interactions,” PNAS, 94:10618-10623 (1997); and VoB, et al. “Chemically induced dimerization: reversible and spatiotemporal control of protein function in cells,” Current Opinion in Chemical Biology, 28:194-201 (2015), the disclosures of each of which are incorporated herein by reference in their entireties for all purposes. In some embodiments, the base editor inhibits base excision repair (BER) of the edited strand. In some embodiments, the base editor protects or binds the non-edited strand. In some embodiments, the base editor comprises UGI activity or USP activity. In some embodiments, the base editor comprises a catalytically inactive inosine-specific nuclease.

[0253] The base editors of the present disclosure can comprise any domain, feature or amino acid sequence which facilitates the editing of a target polynucleotide sequence. For example, in some embodiments, the base editor comprises a nuclear localization sequence (NLS). In some embodiments, an NLS of the base editor is localized between a deaminase domain and a polynucleotide programmable nucleotide binding domain. In some embodiments, an NLS of the base editor is localized C-terminal to a polynucleotide programmable nucleotide binding domain.

[0254] Protein domains included in the fusion protein can be a heterologous functional domain. Non-limiting examples of protein domains which can be included in the fusion protein include a deaminase domain (e.g., cytidine deaminase and/or adenosine deaminase), a uracil glycosylase inhibitor (UGI) domain, epitope tags, and reporter gene sequences. In some embodiments, the adenosine base editor (ABE) can deaminate adenine in DNA. In some embodiments, ABE is generated by replacing APOBEC1 component of BE3 with natural or engineered E. coli TadA, human ADAR2, mouse ADA, or human ADAT2. In some embodiments, ABE comprises an evolved TadA variant. In some embodiments, the base editor is ABE8.1, which comprises or consists essentially of the following sequence or a fragment thereof having adenosine deaminase activity: SEQ ID NO: 331. Other ABE8 sequences are provided in the attached sequence listing (SEQ ID NOs: 332-354).

[0255] In some embodiments, the base editor includes an adenosine deaminase variant comprising an amino acid sequence, which contains alterations relative to an ABE 7*10 reference sequence, as described herein. The term “monomer” as used in Table 7 refers to a monomeric form of TadA*7.10 comprising the alterations described. The term “heterodimer” as used in Table 7 refers to the specified wild-type E. coli TadA adenosine deaminase fused to a TadA*7.10 comprising the alterations as described.

TABLE 7
Adenosine Deaminase Base Editor Variants

| | Adenosine | |
|---|---|---|
| ABE | Deaminase | Adenosine Deaminase Description |
| ABE-605m | MSP605 | monomer_TadA*7.10 + V82G + Y147T + |
| | | Q154S |
| ABE-680m | MSP680 | monomer_TadA*7.10 + I76Y + V82G + |
| | | Y147T + Q154S |
| ABE-823m | MSP823 | monomer_TadA*7.10 + L36H + V82G + |
| | | Y147T + Q154S + N157K |
| ABE-824m | MSP824 | monomer_TadA*7.10 + V82G + Y147D + |
| | | F149Y + Q154S + D167N |
| ABE-825m | MSP825 | monomer_TadA*7.10 + L36H + V82G + |
| | | Y147D + F149Y + Q154S + N157K + |
| | | D167N |
| ABE-827m | MSP827 | monomer_TadA*7.10 + L36H + I76Y + |
| | | V82G + Y147T + Q154S + N157K |
| ABE-828m | MSP828 | monomer_TadA*7.10 + I76Y + V82G + |
| | | Y147D + F149Y + Q154S + D167N |
| ABE-829m | MSP829 | monomer_TadA*7.10 + L36H + I76Y + |
| | | V82G + Y147D + F149Y + Q154S + |
| | | N157K + D167N |
| ABE-605d | MSP605 | heterodimer_(WT) + (TadA*7.10 + V82G + |
| | | Y147T + Q154S) |
| ABE-680d | MSP680 | heterodimer_(WT) + (TadA*7.10 + I76Y + |
| | | V82G + Y147T + Q154S) |
| ABE-823d | MSP823 | heterodimer_(WT) + (TadA*7.10 + L36H + |
| | | V82G + Y147T + Q154S + N157K) |
| ABE-824d | MSP824 | heterodimer_(WT) + (TadA*7.10 + V82G + |
| | | Y147D + F149Y + Q154S + D167N) |
| ABE-825d | MSP825 | heterodimer_(WT) + (TadA*7.10 + L36H + |
| | | V82G + Y147D + F149Y + Q154S + |
| | | N157K + D167N) |
| ABE-827d | MSP827 | heterodimer_(WT) + (TadA*7.10 + L36H + |
| | | I76Y + V82G + Y147T + Q154S + N157K) |
| ABE-828d | MSP828 | heterodimer_(WT) + (TadA*7.10 + I76Y + |
| | | V82G + Y147D + F149Y + Q154S + |
| | | D167N) |
| ABE-829d | MSP829 | heterodimer_(WT) + (TadA*7.10 + L36H + |
| | | I76Y + V82G + Y147D + F149Y + |
| | | Q154S + N157K + D167N) |

[0256] In some embodiments, the base editor comprises a domain comprising all or a portion (e.g., a functional portion) of a uracil glycosylase inhibitor (UGI) or a uracil stabilizing protein (USP) domain.

### Linkers

[0257] In certain embodiments, linkers may be used to link any of the peptides or peptide domains of the invention. The linker may be as simple as a covalent bond, or it may be a polymeric linker many atoms in length. In certain embodiments, the linker is a polypeptide or based on amino acids. In other embodiments, the linker is not peptide-like. In certain embodiments, the linker is a covalent bond (e.g., a carbon-carbon bond, disulfide bond, carbon-heteroatom bond, etc.).

[0258] In some embodiments, any of the fusion proteins provided herein, comprise a cytidine or adenosine deaminase and a Cas9 domain that are fused to each other via a linker. Various linker lengths and flexibilities between the cytidine or adenosine deaminase and the Cas9 domain can be employed (e.g., ranging from very flexible linkers of the form (GGGS) n (SEQ ID NO: 246), (GGGGS)ₙ (SEQ ID NO: 247), and (G)ₙ to more rigid linkers of the form (EAAAK)ₙ (SEQ ID NO: 248), (SGGS)ₙ (SEQ ID NO: 355), SGSETPGTSESATPES (SEQ ID NO: 249) (see, e.g., Guilinger J P, et al. Fusion of catalytically inactive Cas9 to FokI nuclease improves the specificity of genome modification. Nat. Biotechnol. 2014; 32(6): 577-82; the entire contents are incorporated herein by reference) and (XP)ₙ) in order to achieve the optimal length for activity for the cytidine or adenosine deaminase nucleobase editor. In some embodiments, n is 1, 2, 3, 4, 5, 6, 7, 8, 9, 10, 11, 12, 13, 14, or 15. In some embodiments, the linker comprises a (GGS)ₙ motif, wherein n is 1, 3, or 7. In some embodiments, cytidine deaminase or adenosine deaminase and the Cas9 domain of any of the fusion proteins provided herein are fused via a linker comprising the amino acid sequence SGSETPGTSESATPES (SEQ ID NO: 249), which can also be referred to as the XTEN linker.

[0259] In some embodiments, the domains of the base editor are fused via a linker that comprises the amino acid sequence of:

(SEQ ID NO: 356)
SGGSSGSETPGTSESATPESSGGS,
(SEQ ID NO: 357)
SGGSSGGSSGSETPGTSESATPESSGGSSGGS,
or
(SEQ ID NO: 358)
GGSGGSPGSPAGSPTSTEEGTSESATPESGPGTSTEPSEGSAPGSPAGS
PTSTEEGTSTEPSEGSAPGTSTEPSEGSAPGTSESATPESGPGSEPATS
GGSGGS.

[0260] In some embodiments, domains of the base editor are fused via a linker comprising the amino acid sequence SGSETPGTSESATPES (SEQ ID NO: 249), which may also be referred to as the XTEN linker. In some embodiments, a linker comprises the amino acid sequence SGGS (SEQ ID NO: 355). In some embodiments, the linker is 24 amino acids in length. In some embodiments, the linker comprises the amino acid sequence SGGSSGGSSGSETPGTSESATPES (SEQ ID NO: 359). In some embodiments, the linker is 40 amino acids in length. In some embodiments, the linker comprises the amino acid sequence: SGGSSGGSSGSETPGTSESATPESSGGSSGGSSGGSSGGS (SEQ ID NO: 360). In some embodiments, the linker is 64 amino acids in length. In some embodiments, the linker comprises the amino acid sequence:

(SEQ ID NO: 361)
SGGSSGGSSGSETPGTSESATPESSGGSSGGSSGGSSGGSSGSETPGTS
ESATPESSGGSSGGS.

In some embodiments, the linker is 92 amino acids in length. In some embodiments, the linker comprises the amino acid sequence:

(SEQ ID NO: 362)
PGSPAGSPTSTEEGTSESATPESGPGTSTEPSEGSAPGSPAGSPTSTEE
GTSTEPSEGSAPGTSTEPSEGSAPGTSESATPESGPGSEPATS.

In some embodiments, a linker comprises a plurality of proline residues and is 5-21, 5-14, 5-9, 5-7 amino acids in length, e.g., PAPAP (SEQ ID NO: 363), PAPAPA (SEQ ID NO: 364), PAPAPAP (SEQ ID NO: 365), PAPAPAPA (SEQ ID NO: 366), P(AP)4 (SEQ ID NO: 367), P(AP)7 (SEQ ID NO: 368), P(AP)10 (SEQ ID NO: 369) (see, e.g., Tan J, Zhang F, Karcher D, Bock R. Engineering of high-precision base editors for site-specific single nucleotide replacement. Nat Commun. 2019 Jan. 25; 10(1):439; the entire contents are incorporated herein by reference). Such proline-rich linkers are also termed “rigid” linkers.
Nucleic Acid Programmable DNA Binding Proteins with Guide RNAs

[0261] Provided herein are compositions and methods for base editing in cells. Further provided herein are compositions comprising a guide polynucleotide sequence, e.g., a guide RNA sequence, or a combination of 2, 3, 4, 5, 6, 7, 8, 9, 10, 11, 12, 13, 14, 15, 16, 17, 18, 19, 20, or more guide RNAs as provided herein. In some embodiments, a composition for base editing as provided herein further comprises a polynucleotide that encodes a base editor, e.g., a C-base editor or an A-base editor. For example, a composition for base editing may comprise a mRNA sequence encoding a BE, a BE4, an ABE, and a combination of one or more guide RNAs as provided. A composition for base editing may comprise a base editor polypeptide and a combination of one or more of any guide RNAs provided herein. Such a composition may be used to effect base editing in a cell through different delivery approaches, for example, electroporation, nucleofection, viral transduction or transfection. In some embodiments, the composition for base editing comprises an mRNA sequence that encodes a base editor and a combination of one or more guide RNA sequences provided herein for electroporation.

[0262] Some aspects of this disclosure provide systems comprising any of the fusion proteins or complexes provided herein, and a guide RNA bound to a nucleic acid programmable DNA binding protein (napDNAbp) domain (e.g., a Cas9 (e.g., a dCas9, a nuclease active Cas9, or a Cas9 nickase) or Cas12) of the fusion protein or complex. These complexes are also termed ribonucleoproteins (RNPs). In some embodiments, the guide nucleic acid (e.g., guide RNA) is from 15-100 nucleotides long and comprises a sequence of at least 10 contiguous nucleotides that is complementary to a target sequence. In some embodiments, the target sequence is a DNA sequence. In some embodiments, the target sequence is an RNA sequence. In some embodiments, the target sequence is a sequence in the genome of a bacteria, yeast, fungi, insect, plant, or animal. In some embodiments, the target sequence is a sequence in the genome of a human. In some embodiments, the 3′ end of the target sequence is immediately adjacent to a canonical PAM sequence (NGG). In some embodiments, the 3′ end of the target sequence is immediately adjacent to a non-canonical PAM sequence (e.g., a sequence listed in Table 3 or 5′-NAA-3′). In some embodiments, the guide nucleic acid (e.g., guide RNA) is complementary to a sequence in a gene of interest (e.g., a gene associated with a disease or disorder).

[0263] Some aspects of this disclosure provide methods of using the fusion proteins, or complexes provided herein. For example, some aspects of this disclosure provide methods comprising contacting a DNA molecule with any of the fusion proteins or complexes provided herein, and with at least one guide RNA, wherein the guide RNA is about 15-100 nucleotides long and comprises a sequence of at least 10 contiguous nucleotides that is complementary to a target sequence.

[0264] The domains of the base editor disclosed herein can be arranged in any order.

[0265] A defined target region can be a deamination window. A deamination window can be the defined region in which a base editor acts upon and deaminates a target nucleotide. In some embodiments, the deamination window is within a 2, 3, 4, 5, 6, 7, 8, 9, or 10 base regions. In some embodiments, the deamination window is 5, 6, 7, 8, 9, 10, 11, 12, 13, 14, 15, 16, 17, 18, 19, 20, 21, 22, 23, 24, or 25 bases upstream of the PAM.

[0266] The base editors of the present disclosure can comprise any domain, feature or amino acid sequence which facilitates the editing of a target polynucleotide sequence.

### Methods of Using Fusion Proteins or Complexes Comprising a Cytidine or Adenosine Deaminase and a Cas9 Domain

[0267] Some aspects of this disclosure provide methods of using the fusion proteins, or complexes provided herein. For example, some aspects of this disclosure provide methods comprising contacting a DNA molecule with any of the fusion proteins or complexes provided herein, and with at least one guide RNA described herein.

[0268] In some embodiments, a fusion protein or complex of the invention is used for editing a target gene of interest. In particular, a cytidine deaminase or adenosine deaminase nucleobase editor described herein is capable of making multiple mutations within a target sequence. These mutations may affect the function of the target. For example, when a cytidine deaminase or adenosine deaminase nucleobase editor is used to target a regulatory region the function of the regulatory region is altered and the expression of the downstream protein is reduced or eliminated.

### Base Editor Efficiency

[0269] In some embodiments, the purpose of the methods provided herein is to alter a gene and/or gene product via gene editing. The nucleobase editing proteins provided herein can be used for gene editing-based human therapeutics in vitro or in vivo. It will be understood by the skilled artisan that the nucleobase editing proteins provided herein, e.g., the fusion proteins or complexes comprising a polynucleotide programmable nucleotide binding domain (e.g., Cas9) and a nucleobase editing domain (e.g., an adenosine deaminase domain or a cytidine deaminase domain) can be used to edit a nucleotide from A to G or C to T.

[0270] Advantageously, base editing systems as provided herein provide genome editing without generating double-strand DNA breaks, without requiring a donor DNA template, and without inducing an excess of stochastic insertions and deletions as CRISPR may do. In some embodiments, the present disclosure provides base editors that efficiently generate an intended mutation, such as a STOP codon, in a nucleic acid (e.g., a nucleic acid within a genome of a subject) without generating a significant number of unintended mutations, such as unintended point mutations.

[0271] The base editors of the invention advantageously modify a specific nucleotide base encoding a protein without generating a significant proportion of indels (i.e., insertions or deletions). Such indels can lead to frame shift mutations within a coding region of a gene.

[0272] In some embodiments, the base editors provided herein are capable of generating a ratio of intended mutations to indels (i.e., intended point mutations:unintended point mutations) that is greater than 1:1. In some embodiments, the base editors provided herein are capable of generating a ratio of intended mutations to indels that is at least 1.5:1, at least 2:1, at least 2.5:1, at least 3:1, at least 3.5:1, at least 4:1, at least 4.5:1, at least 5:1, at least 5.5:1, at least 6:1, at least 6.5:1, at least 7:1, at least 7.5:1, at least 8:1, at least 10:1, at least 12:1, at least 15:1, at least 20:1, at least 25:1, at least 30:1, at least 40:1, at least 50:1, at least 100:1, at least 200:1, at least 300:1, at least 400:1, at least 500:1, at least 600:1, at least 700:1, at least 800:1, at least 900:1, or at least 1000:1, or more. The number of intended mutations and indels may be determined using any suitable method.

[0273] In some embodiments, the base editors provided herein can limit formation of indels in a region of a nucleic acid. In some embodiments, the region is at a nucleotide targeted by a base editor or a region within 2, 3, 4, 5, 6, 7, 8, 9, or 10 nucleotides of a nucleotide targeted by a base editor. In some embodiments, any of the base editors provided herein can limit the formation of indels at a region of a nucleic acid to less than 1%, less than 1.5%, less than 2%, less than 2.5%, less than 3%, less than 3.5%, less than 4%, less than 4.5%, less than 5%, less than 6%, less than 7%, less than 8%, less than 9%, less than 10%, less than 12%, less than 15%, or less than 20%.

[0274] Base editing is often referred to as a “modification”, such as, a genetic modification, a gene modification and modification of the nucleic acid sequence and is clearly understandable based on the context that the modification is a base editing modification. A base editing modification is therefore a modification at the nucleotide base level, for example as a result of the deaminase activity discussed throughout the disclosure, which then results in a change in the gene sequence and may affect the gene product.

[0275] In some embodiments, the modification, e.g., single base edit results in about or at least about a 10%, 15%, 20%, 25%, 30%, 35%, 40%, 45%, 50%, 55%, 60%, 65%, 70%, 75%, 80%, 85%, 90%, 95%, 99%, or 100% reduction, or reduction to an undetectable level, of the gene targeted expression.

[0276] The invention provides adenosine deaminase variants (e.g., ABE8 variants) that have increased efficiency and specificity. In particular, the adenosine deaminase variants described herein are more likely to edit a desired base within a polynucleotide and are less likely to edit bases that are not intended to be altered (e.g., “bystanders”).

[0277] In some embodiments, any of the base editing system comprising one of the ABE8 base editor variants described herein has reduced bystander editing or mutations by at least 1%, 2%, 3%, 4%, 5%, 10%, 15%, 20%, 25%, 30%, 35%, 40%, 45%, 50%, 55%, 60%, 65%, 70%, 75%, 80%, 85%, 90%, 95%, or 99% compared to a base editor system comprising an ABE7 base editor, e.g., ABE7.10.

[0278] In some embodiments, any of the base editor systems provided herein result in less than 70%, less than 65%, less than 60%, less than 55%, 50%, less than 40%, less than 30%, less than 20%, less than 19%, less than 18%, less than 17%, less than 16%, less than 15%, less than 14%, less than 13%, less than 12%, less than 11%, less than 10%, less than 9%, less than 8%, less than 7%, less than 6%, less than 5%, less than 4%, less than 3%, less than 2%, less than 1%, less than 0.9%, less than 0.8%, less than 0.7%, less than 0.6%, less than 0.5%, less than 0.4%, less than 0.3%, less than 0.2%, less than 0.1%, less than 0.09%, less than 0.08%, less than 0.07%, less than 0.06%, less than 0.05%, less than 0.04%, less than 0.03%, less than 0.02%, or less than 0.01% bystander editing of one or more nucleotides (e.g., mutation of an off-target nucleotide). In embodiments, the bystander nucleotide(s) are selected from one or more of C9 and/or C11 of the following sequence ATAC₇TC₉AC₁₁AATTACAACTGG (SEQ ID NO: 481) and/or C2, C10, and/or C13 of the following sequence CTC₂AC₄AATTAC₁₀AAC₁₃TGGGGCC (SEQ ID NO: 483) and/or C5 and/or C7 of the following sequence AC₅TC₇AC₉AATTACAACTGGGG (SEQ ID NO: 482).

[0279] In some embodiments, any of the ABE8 base editor variants described herein has higher base editing efficiency compared to the ABE7 base editors. In some embodiments, any of the ABE8 base editor variants described herein have at least 1%, 2%, 3%, 4%, 5%, 10%, 15%, 20%, 25%, 30%, 35%, 40%, 45%, 50%, 55%, 60%, 65%, 70%, 75%, 80%, 85%, 90%, 95%, 99%, 100%, 105%, 110%, 115%, 120%, 125%, 130%, 135%, 140%, 145%, 150%, 155%, 160%, 165%, 170%, 175%, 180%, 185%, 190%, 195%, 200%, 210%, 220%, 230%, 240%, 250%, 260%, 270%, 280%, 290%, 300%, 310%, 320%, 330%, 340%, 350%, 360%, 370%, 380%, 390%, 400%, 450%, or 500% higher base editing efficiency compared to an ABE7 base editor, e.g., ABE7.10.

[0280] The ABE8 base editor variants described herein may be delivered to a host cell via a plasmid, a vector, a LNP complex, or an mRNA. In some embodiments, any of the ABE8 base editor variants described herein is delivered to a host cell as an mRNA.

[0281] In some embodiments, the method described herein, for example, the base editing methods has minimum to no off-target effects. In some embodiments, the method described herein, for example, the base editing methods, has minimal to no chromosomal translocations.

[0282] In some embodiments, the base editing method described herein results in about 91%, 92%, 93%, 94%, 95%, 96%, 97%, 98%, 99% or 100% of a cell population that have been successfully edited.

[0283] In some embodiments, the percent of viable cells in a cell population following a base editing intervention is greater than at least 60%, 70%, 80%, or 90% of the starting cell population at the time of the base editing event. In some embodiments, the percent of viable cells in a cell population following editing is about 70%. In some embodiments, the percent of viable cells in a cell population following editing is about 75%. In some embodiments, the percent of viable cells in a cell population following editing is about 80%. In some embodiments, the percent of viable cells in a cell population as described above is about 85%. In some embodiments, the percent of viable cells in a cell population as described above is about 90%, or about 91%, 92%, 93%, 94% 95%, 96%, 97%, 98%, 99%, or 100% of the cells in the population at the time of the base editing event.

[0284] In embodiments, the cell population is a population of cells contacted with a base editor, complex, or base editor system of the present disclosure.

[0285] The number of intended mutations and indels can be determined using any suitable method, for example, as described in International PCT Application Nos. PCT/US2017/045381 (WO2018/027078) and PCT/US2016/058344 (WO2017/070632); Komor, A. C., et al., “Programmable editing of a target base in genomic DNA without double-stranded DNA cleavage” Nature 533, 420-424 (2016); Gaudelli, N.M., et al., “Programmable base editing of A⋅T to G⋅C in genomic DNA without DNA cleavage” Nature 551, 464-471 (2017); and Komor, A. C., et al., “Improved base excision repair inhibition and bacteriophage Mu Gam protein yields C:G-to-T:A base editors with higher efficiency and product purity” Science Advances 3:eaao4774 (2017); the entire contents of which are hereby incorporated by reference.

[0286] In some embodiments, to calculate indel frequencies, sequencing reads are scanned for exact matches to two 10-bp sequences that flank both sides of a window in which indels can occur. If no exact matches are located, the read is excluded from analysis. If the length of this indel window exactly matches the reference sequence the read is classified as not containing an indel. If the indel window is two or more bases longer or shorter than the reference sequence, then the sequencing read is classified as an insertion or deletion, respectively. In some embodiments, the base editors provided herein can limit formation of indels in a region of a nucleic acid. In some embodiments, the region is at a nucleotide targeted by a base editor or a region within 2, 3, 4, 5, 6, 7, 8, 9, or 10 nucleotides of a nucleotide targeted by a base editor.

### Multiplex Editing

[0287] In some embodiments, the base editor system provided herein is capable of multiplex editing of a plurality of nucleobase pairs in one or more genes or polynucleotide sequences. In some embodiments, the plurality of nucleobase pairs is located in the same gene or in one or more genes, wherein at least one gene is located in a different locus. In some embodiments, the multiplex editing comprises one or more guide polynucleotides. In some embodiments, the multiplex editing comprises one or more base editor systems. In some embodiments, the multiplex editing comprises one or more base editor systems with a single guide polynucleotide or a plurality of guide polynucleotides. In some embodiments, the multiplex editing comprises one or more guide polynucleotides with a single base editor system. It should be appreciated that the characteristics of the multiplex editing using any of the base editors as described herein can be applied to any combination of methods using any base editor provided herein. It should also be appreciated that the multiplex editing using any of the base editors as described herein can comprise a sequential editing of a plurality of nucleobase pairs.

[0288] In some embodiments, the base editor system capable of multiplex editing of a plurality of nucleobase pairs in one or more genes comprises one of ABE7, ABE8, and/or ABE9 base editors.

### Expression of Fusion Proteins or Complexes in a Host Cell

[0289] Fusion proteins or complexes of the invention comprising a deaminase may be expressed in virtually any host cell of interest, including but not limited to animal cells using routine methods known to the skilled artisan. For example, a DNA encoding an adenosine deaminase of the invention can be cloned by designing suitable primers for the upstream and downstream of CDS based on the cDNA sequence. The cloned DNA may be directly, or after digestion with a restriction enzyme when desired, or after addition of a suitable linker and/or a nuclear localization signal, ligated with a DNA encoding one or more additional components of a base editing system. The base editing system is translated in a host cell to form a complex.

[0290] A polynucleotide encoding a polypeptide described herein can be obtained by chemically synthesizing the polynucleotide, or by connecting synthesized partly overlapping oligo short chains by utilizing the PCR method and the Gibson Assembly method to construct a polynucleotide (e.g., DNA) encoding the full length thereof. The advantage of constructing a full-length polynucleotide by chemical synthesis or a combination of PCR method or Gibson Assembly method is that the codons to be used can be selected in according to the host into which the polynucleotide is to be introduced. In the expression from a heterologous DNA molecule, the protein expression level is expected to increase by converting the DNA sequence thereof to a codon highly frequently used in the host organism. Codon use data for a host cell (e.g., codon use data available at kazusa.or.jp/codon/index.html) can be used to guide codon optimization for a polynucleotide sequence encoding a polypeptide. Codons having low use frequency in the host may be converted to a codon coding the same amino acid and having high use frequency.

[0291] An expression vector containing a polynucleotide encoding a nucleic acid sequence-recognizing module and/or a nucleic acid base converting enzyme can be produced, for example, by linking the DNA to the downstream of a promoter in a suitable expression vector.

[0292] Regarding the promoter to be used, any promoter appropriate for a host to be used for gene expression can be used. In a conventional method using double-stranded breaks, since the survival rate of the host cell sometimes decreases markedly due to the toxicity, it is desirable to increase the number of cells by the start of the induction by using an inductive promoter. However, since sufficient cell proliferation can also be afforded by expressing the nucleic acid-modifying enzyme complex of the present invention, a constitutive promoter can be used without limitation.

[0293] For example, when the host is an animal cell, an SR.alpha. promoter, SV40 promoter, LTR promoter, cytomegalovirus (CMV) promoter, Rous sarcoma virus (RSV) promoter, Moloney mouse leukemia virus (MoMuLV), LTR, herpes simplex virus thymidine kinase (HSV-TK) promoter, and the like can be used. Of these, CMV promoter, SR.alpha. promoter and the like are preferable.

[0294] Any suitable promoter can be used to drive expression of a base editor system or component thereof and, where appropriate, the guide nucleic acid. For ubiquitous expression, promoters include CMV, CBA, CBH, CAG, CBh, PGK, SV40, Ferritin heavy or light chains. In some embodiments, the promoter facilitates or preferentially facilitates expression (e.g., cell-type specific expression) in retinal cells, such as rod and/or cone cells. For cone cell expression, suitable promoters include PR1.7, hG1.7, and hGRK 198 bp, exemplary nucleotide sequences for which include those with at least 85% sequence identity to one of the following representative nucleotide sequences and capable of promoting the expression of a gene in a cell:

Representative PR1.7 promoter sequence (GenBank Accession No. KT886395.1):
source:
(SEQ ID NO: 485)
GGAGGCTGAGGGGTGGGGAAAGGGCATGGGTGTTTCATGAGGACAGAGCTTCCGTTTCATGC
AATGAAAAGAGTTTGGAGACGGATGGTGGTGACTGGACTATACACTTACACACGGTAGCGAT
GGTACACTTTGTATTATGTATATTTTACCACGATCTTTTTAAAGTGTCAAAGGCAAATGGCC
AAATGGTTCCTTGTCCTATAGCTGTAGCAGCCATCGGCTGTTAGTGACAAAGCCCCTGAGTC
AAGATGACAGCAGCCCCCATAACTCCTAATCGGCTCTCCCGCGTGGAGTCATTTAGGAGTAG
TCGCATTAGAGACAAGTCCAACATCTAATCTTCCACCCTGGCCAGGGCCCCAGCTGGCAGCG
AGGGTGGGAGACTCCGGGCAGAGCAGAGGGCGCTGACATTGGGGCCCGGCCTGGCTTGGGTC
CCTCTGGCCTTTCCCCAGGGGCCCTCTTTCCTTGGGGCTTTCTTGGGCCGCCACTGCTCCCG
CTCCTCTCCCCCCATCCCACCCCCTCACCCCCTCGTTCTTCATATCCTTCTCTAGTGCTCCC
TCCACTTTCATCCACCCTTCTGCAAGAGTGTGGGACCACAAATGAGTTTTCACCTGGCCTGG
GGACACACGTGCCCCCACAGGTGCTGAGTGACTTTCTAGGACAGTAATCTGCTTTAGGCTAA
AATGGGACTTGATCTTCTGTTAGCCCTAATCATCAATTAGCAGAGCCGGTGAAGGTGCAGAA
CCTACCGCCTTTCCAGGCCTCCTCCCACCTCTGCCACCTCCACTCTCCTTCCTGGGATGTGG
GGGCTGGCACACGTGTGGCCCAGGGCATTGGTGGGATTGCACTGAGCTGGGTCATTAGCGTA
ATCCTGGACAAGGGCAGACAGGGCGAGCGGAGGGCCAGCTCCGGGGCTCAGGCAAGGCTGGG
GGCTTCCCCCAGACACCCCACTCCTCCTCTGCTGGACCCCCACTTCATAGGGCACTTCGTGT
TCTCAAAGGGCTTCCAAATAGCATGGTGGCCTTGGATGCCCAGGGAAGCCTCAGAGTTGCTT
ATCTCCCTCTAGACAGAAGGGGAATCTCGGTCAAGAGGGAGAGGTCGCCCTGTTCAAGGCCA
CCCAGCCAGCTCATGGCGGTAATGGGACAAGGCTGGCCAGCCATCCCACCCTCAGAAGGGAC
CCGGTGGGGCAGGTGATCTCAGAGGAGGCTCACTTCTGGGTCTCACATTCTTGGATCCGGTT
CCAGGCCTCGGCCCTAAATAGTCTCCCTGGGCTTTCAAGAGAACCACATGAGAAAGGAGGAT
TCGGGCTCTGAGCAGTTTCACCACCCACCCCCCAGTCTGCAAATCCTGACCCGTGGGTCCAC
CTGCCCCAAAGGCGGACGCAGGACAGTAGAAGGGAACAGAGAACACATAAACACAGAGAGGG
CCACAGCGGCTCCCACAGTCACCGCCACCTTCCTGGCGGGGATGGGTGGGGCGTCTGAGTTT
GGTTCCCAGCAAATCCCTCTGAGCCGCCCTTGCGGGCTCGCCTCAGGAGCAGGGGAGCAAGA
GGTGGGAGGAGGAGGTCTAAGTCCCAGGCCCAATTAAGAGATCAGGTAGTGTAGGGTTTGGG
AGCTTTTAAGGTGAAGAGGCCCGGGCTGATCCCACAGGCCAGTATAAAGCGCCGTGACCCTC
AGGTGATGCGCCAGGGCCGGCTGCCGTCGGGGACAGGGCTTTCCATAGCCATG.
Representative hG1.7 promoter sequence (see U.S. Patent Application
Publicatin No. 20200392536, the disclosure of which is incorporated herein
by reference in its entirety for all purposes):
(SEQ ID NO: 486)
TAGGAATAGAAGGGTGGGTGCAGGAGGCTGAGGGGTGGGGAAAGGGCATGGGTGTTTCATGA
GGACAGAGCTTCCGTTTCATGCAATGAAAAGAGTTTGGAGACGGATGGTGGTGACTGGACTA
TACACTTACACACGGTAGCGATGGTACACTTTGTATTATGTATATTTTACCACGATCTTTTT
AAAGTGTCAAAGGCAAATGGCCAAATGGTTCCTTGTCCTATAGCTGTAGCAGCCATCGGCTG
TTAGTGACAAAGCCCCTGAGTCAAGATGACAGCAGCCCCCATAACTCCTAATCGGCTCTCCC
GCGTGGAGTCATTTAGGAGTAGTCGCATTAGAGACAAGTCCAACATCTAATCTTCCACCCTG
GCCAGGGCCCCAGCTGGCAGCGAGGGTGGGAGACTCCGGGCAGAGCAGAGGGCGCTGACATT
GGGGCCCGGCCTGGCTTGGGTCCCTCTGGCCTTTCCCCAGGGGCCCTCTTTCCTTGGGGCTT
TCTTGGGCCGCCACTGCTCCCGCTCCTCTCCCCCCATCCCACCCCCTCACCCCCTCGTTCTT
CATATCCTTCTCTAGTGCTCCCTCCACTTTCATCCACCCTTCTGCAAGAGTGTGGGACCACA
AATGAGTTTTCACCTGGCCTGGGGACACACGTGCCCCCACAGGTGCTGAGTGACTTTCTAGG
ACAGTAATCTGCTTTAGGCTAAAATGGGACTTGATCTTCTGTTAGCCCTAATCATCAATTAG
CAGAGCCGGTGAAGGTGCAGAACCTACCGCCTTTCCAGGCCTCCTCCCACCTCTGCCACCTC
CACTCTCCTTCCTGGGATGTGGGGGCTGGCACACGTGTGGCCCAGGGCATTGGTGGGATTGC
ACTGAGCTGGGTCATTAGCGTAATCCTGGACAAGGGCAGACAGGGCGAGCGGAGGGCCAGCT
CCGGGGCTCAGGCAAGGCTGGGGGCTTCCCCCAGACACCCCACTCCTCCTCTGCTGGACCCC
CACTTCATAGGGCACTTCGTGTTCTCAAAGGGCTTCCAAATAGCATGGTGGCCTTGGATGCC
CAGGGAAGCCTCAGAGTTGCTTATCTCCCTCTAGACAGAAGGGGAATCTCGGTCAAGAGGGA
GAGGTCGCCCTGTTCAAGGCCACCCAGCCAGCTCATGGCGGTAATGGGACAAGGCTGGCCAG
CCATCCCACCCTCAGAAGGGACCCGGTGGGGCAGGTGATCTCAGAGGAGGCTCACTTCTGGG
TCTCACATTCTTGACAGGTATTTGCCACTAAGCCCAGCTAATTGTTTTTTATTTAGTAGAAA
CGGGGTTTCACCATGTTAGTCAGGCTGGTCGGGAACTCCTGACCTCAGGAGATCTACCCGCC
TTGGCCTCCCAAAGTGCTGGGATTACAGGCGTGTGCCACTGTGCCCAGCCACTTTTTTTTAG
ACAGAGTCTTGGTCTGTTGCCCAGGCTAGAGTTCAGTGGCGCCATCTCAGCTCACTGCAACC
TCCGCCTCCCAGATTCAAGCGATTCTCCTGCCTCGACCTCCCAGTAGCTGGGATTACAGGTT
TCCAGCAAATCCCTCTGAGCCGCCCCCGGGGGCTCGCCTCAGGAGCAAGGAAGCAAGGGGTG
GGAGGAGGAGGTCTAAGTCCCAGGCCCAATTAAGAGATCAGATGGTGTAGGATTTGGGAGCT
TTTAAGGTGAAGAGGCCCGGGCTGATCCCACTGGCCGGTATAAAGCACCGTGACCCTCAGGT
GACGCACCATCTAGAGCTGCCGTCGGGGACAGGGCTTTCCATAGCC.
Representative hGRK 198 bp promoer sequence:
(SEQ ID NO: 487)
GGGCCCCAGAAGCCTGGTggttgtttgtccttctcaggggaaaagtgaggcggccccttgga
ggaaggggccgggcagaatgatctaatcggattccaagcagctcaggggattgtctttttct
agcaccttcttgccactcctaagcgtcctccgtgaccccggctgggatttagcctggtgctg
tgtcagccccgg.

[0295] For brain or other CNS cell expression, suitable promoters include: SynapsinI for all neurons, CaMKIIalpha for excitatory neurons, GAD67 or GAD65 or VGAT for GABAergic neurons. For liver cell expression, suitable promoters include the Albumin promoter. For lung cell expression, suitable promoters include SP-B. For endothelial cells, suitable promoters include ICAM. For hematopoietic cell expression suitable promoters include IFNbeta or CD45. For osteoblast expression suitable promoters can include OG-2.

[0296] Expression vectors for use in the present invention, besides those mentioned above, can comprise an enhancer, a splicing signal, a terminator, a polyA addition signal, a selection marker such as drug resistance gene, an auxotrophic complementary gene and the like, a replication origin, and the like can be used.

[0297] An RNA encoding a protein domain described herein can be prepared by, for example, in vitro transcription of a nucleic acid sequence encoding any of the fusion proteins or complexes disclosed herein.

[0298] A fusion protein or complex of the invention can be intracellularly expressed by introducing into the cell an expression vector comprising a nucleic acid sequence encoding the fusion protein or complex. In embodiments, a fusion protein or complex of the invention is encoded by a polynucleotide present in a viral vector (e.g., adeno-associated virus (AAV), AAV3, AAV3b, AAV4, AAV5, AAV6, AAV7, AAV8, AAV9, AAVrh8, AAV10, and variants thereof), or a suitable capsid protein of any viral vector.

### Delivery Systems

### Nucleic Acid-Based Delivery of Base Editor Systems

[0299] Nucleic acid molecules encoding a base editor system according to the present disclosure can be administered to subjects or delivered into cells in vitro or in vivo by art-known methods or as described herein. For example, a base editor system comprising a deaminase (e.g., cytidine or adenine deaminase) can be delivered by vectors (e.g., viral or non-viral vectors), or by naked DNA, DNA complexes, lipid nanoparticles, or a combination of the aforementioned compositions. A base editor system may be delivered to a cell using any methods available in the art including, but not limited to, physical methods (e.g., electroporation, particle gun, calcium phosphate transfection), viral methods, non-viral methods (e.g., liposomes, cationic methods, lipid nanoparticles, polymeric nanoparticles), or biological non-viral methods (e.g., attenuated bacterial, engineered bacteriophages, mammalian virus-like particles, biological liposomes, erythrocyte ghosts, exosomes).

[0300] Nanoparticles, which can be organic or inorganic, are useful for delivering a base editor system or component thereof. Nanoparticles are well known in the art and any suitable nanoparticle can be used to deliver a base editor system or component thereof, or a nucleic acid molecule encoding such components. In one example, organic (e.g., lipid and/or polymer) nanoparticles are suitable for use as delivery vehicles in certain embodiments of this disclosure. Non-limiting examples of lipid nanoparticles suitable for use in the methods of the present disclosure include those described in International Patent Application Publications No. WO2022140239, WO2022140252, WO2022140238, WO2022159421, WO2022159472, WO2022159475, WO2022159463, WO2021113365, and WO2021141969, the disclosures of each of which is incorporated herein by reference in its entirety for all purposes.

### Viral Vectors

[0301] A base editor described herein can be delivered with a viral vector. In some embodiments, a base editor disclosed herein can be encoded on a nucleic acid that is contained in a viral vector. In some embodiments, one or more components of the base editor system can be encoded on one or more viral vectors.

[0302] Viral vectors can include lentivirus (e.g., HIV and FIV-based vectors), Adenovirus (e.g., AD100), Retrovirus (e.g., Maloney murine leukemia virus, MML-V), herpesvirus vectors (e.g., HSV-2), and Adeno-associated viruses (AAVs), or other plasmid or viral vector types, in particular, using formulations and doses from, for example, U.S. Pat. No. 8,454,972 (formulations, doses for adenovirus), U.S. Pat. No. 8,404,658 (formulations, doses for AAV) and U.S. Pat. No. 5,846,946 (formulations, doses for DNA plasmids) and from clinical trials and publications regarding the clinical trials involving lentivirus, AAV and adenovirus. For example, for AAV, the route of administration, formulation and dose can be as in U.S. Pat. No. 8,454,972 and as in clinical trials involving AAV. For Adenovirus, the route of administration, formulation and dose can be as in U.S. Pat. No. 8,404,658 and as in clinical trials involving adenovirus. For plasmid delivery, the route of administration, formulation and dose can be as in U.S. Pat. No. 5,846,946 and as in clinical studies involving plasmids. Doses can be based on or extrapolated to an average 70 kg individual (e.g., a male adult human), and can be adjusted for patients, subjects, mammals of different weight and species. Frequency of administration is within the ambit of the medical or veterinary practitioner (e.g., physician, veterinarian), depending on usual factors including the age, sex, general health, other conditions of the patient or subject and the particular condition or symptoms being addressed. The viral vectors can be injected into the tissue of interest. For cell-type specific base editing, the expression of the base editor and optional guide nucleic acid can be driven by a cell-type specific promoter.

[0303] Viral vectors can be selected based on the application. For example, for in vivo gene delivery, AAV can be advantageous over other viral vectors. In some embodiments, AAV allows low toxicity, which can be due to the purification method not requiring ultra-centrifugation of cell particles that can activate the immune response. In some embodiments, AAV allows low probability of causing insertional mutagenesis because it doesn't integrate into the host genome. Adenoviruses are commonly used as vaccines because of the strong immunogenic response they induce. Packaging capacity of the viral vectors can limit the size of the base editor that can be packaged into the vector.

[0304] AAV has a packaging capacity of about 4.5 Kb or 4.75 Kb including two 145 base inverted terminal repeats (ITRs). This means disclosed base editor as well as a promoter and transcription terminator can fit into a single viral vector. Constructs larger than 4.5 or 4.75 Kb can lead to significantly reduced virus production. For example, SpCas9 is quite large, the gene itself is over 4.1 Kb, which makes it difficult for packing into AAV. Therefore, embodiments of the present disclosure include utilizing a disclosed base editor which is shorter in length than conventional base editors. In some examples, the base editors are less than 4 kb. Disclosed base editors can be less than 4.5 kb, 4.4 kb, 4.3 kb, 4.2 kb, 4.1 kb, 4 kb, 3.9 kb, 3.8 kb, 3.7 kb, 3.6 kb, 3.5 kb, 3.4 kb, 3.3 kb, 3.2 kb, 3.1 kb, 3 kb, 2.9 kb, 2.8 kb, 2.7 kb, 2.6 kb, 2.5 kb, 2 kb, or 1.5 kb. In some embodiments, the disclosed base editors are 4.5 kb or less in length.

[0305] An AAV can be AAV1, AAV2, AAV5, AAV6 or any combination thereof. One can select the type of AAV with regard to the cells to be targeted; e.g., one can select AAV serotypes 1, 2, 5 or a hybrid capsid AAV1, AAV2, AAV5 or any combination thereof for targeting brain or neuronal cells; and one can select AAV4 for targeting cardiac tissue. AAV8 is useful for delivery to the liver. A tabulation of certain AAV serotypes as to these cells can be found in Grimm, D. et al, J. Virol. 82: 5887-5911 (2008)).

[0306] In some embodiments, lentiviral vectors are used to transduce a cell of interest with a polynucleotide encoding a base editor or base editor system as provided herein. Lentiviruses are complex retroviruses that have the ability to infect and express their genes in both mitotic and post-mitotic cells. The most commonly known lentivirus is the human immunodeficiency virus (HIV), which uses the envelope glycoproteins of other viruses to target a broad range of cell types.

[0307] In another embodiment, minimal non-primate lentiviral vectors based on the equine infectious anemia virus (EIAV) are also contemplated. In another embodiment, RetinoStat®, an equine infectious anemia virus-based lentiviral gene therapy vector that expresses angiostatic proteins endostatin and angiostatin that is contemplated to be delivered via a subretinal injection. In another embodiment, use of self-inactivating lentiviral vectors are contemplated.

[0308] Any RNA of the systems, for example a guide RNA or a base editor-encoding mRNA, can be delivered in the form of RNA. Base editor-encoding mRNA can be generated using in vitro transcription. For example, nuclease mRNA can be synthesized using a PCR cassette containing the following elements: T7 promoter, optional kozak sequence (GCCACC), nuclease sequence, and 3′ UTR such as a 3′ UTR from beta globin-polyA tail. The cassette can be used for transcription by T7 polymerase. Guide polynucleotides (e.g., gRNA) can also be transcribed using in vitro transcription from a cassette containing a T7 promoter, followed by the sequence “GG”, and guide polynucleotide sequence.

### Non-Viral Platforms for Gene Transfer

[0309] Non-viral platforms for introducing a heterologous polynucleotide into a cell of interest are known in the art.

[0310] For example, the disclosure provides a method of inserting a heterologous polynucleotide into the genome of a cell using a Cas9 or Cas12 (e.g., Cas12b) ribonucleoprotein complex (RNP)-DNA template complex where an RNP including a Cas9 or Cas12 nuclease domain and a guide RNA, wherein the guide RNA specifically hybridizes to a target region of the genome of the cell, and wherein the Cas9 nuclease domain cleaves the target region to create an insertion site in the genome of the cell. A DNA template is then used to introduce a heterologous polynucleotide. In embodiments, the DNA template is a double-stranded or single-stranded DNA template, wherein the size of the DNA template is about 200 nucleotides or is greater than about 200 nucleotides, wherein the 5′ and 3′ ends of the DNA template comprise nucleotide sequences that are homologous to genomic sequences flanking the insertion site. In some embodiments, the DNA template is a single-stranded circular DNA template. In embodiments, the molar ratio of RNP to DNA template in the complex is from about 3:1 to about 100:1.

[0311] In some embodiments, the DNA template is a linear DNA template. In some examples, the DNA template is a single-stranded DNA template. In certain embodiments, the single-stranded DNA template is a pure single-stranded DNA template. In some embodiments, the single stranded DNA template is a single-stranded oligodeoxynucleotide (ssODN).

[0312] In other embodiments, a single-stranded DNA (ssDNA) can produce efficient HDR with minimal off-target integration. In one embodiment, an ssDNA phage is used to efficiently and inexpensively produce long circular ssDNA (cssDNA) donors. These cssDNA donors serve as efficient HDR templates when used with Cas9 or Cas12 (e.g., Cas12a, Cas12b), with integration frequencies superior to linear ssDNA (QssDNA) donors.

### Inteins

[0313] Inteins (intervening protein) are auto-processing domains found in a variety of diverse organisms, which carry out a process known as protein splicing.

[0314] Non-limiting examples of inteins include any intein or intein-pair known in the art, which include a synthetic intein based on the dnaE intein, the Cfa-N(e.g., split intein-N) and Cfa-C(e.g., split intein-C) intein pair, which has been described (e.g., in Stevens et al., J Am Chem Soc. 2016 Feb. 24; 138(7):2162-5, incorporated herein by reference), and DnaE. Non-limiting examples of pairs of inteins that may be used in accordance with the present disclosure include: Cfa DnaE intein, Ssp GyrB intein, Ssp DnaX intein, Ter DnaE3 intein, Ter ThyX intein, Rma DnaB intein and Cne Prp8 intein (e.g., as described in U.S. Pat. No. 8,394,604, incorporated herein by reference). Exemplary nucleotide and amino acid sequences of inteins are provided in the Sequence Listing at SEQ ID NOs: 370-377, 389-402 and 489-510. Inteins suitable for use in embodiments of the present disclosure and methods for use thereof are described in U.S. Pat. No. 10,526,401, International Patent Application Publication No. WO 2013/045632 or WO 2020/051561, and in U.S. Patent Application Publication No. US 2020/0055900, the full disclosures of which are incorporated herein by reference in their entireties by reference for all purposes.

[0315] Intein-N and intein-C may be fused to the N-terminal portion of a split Cas9 and the C-terminal portion of the split Cas9, respectively, for the joining of the N-terminal portion of the split Cas9 and the C-terminal portion of the split Cas9. For example, in some embodiments, an intein-N is fused to the C-terminus of the N-terminal portion of the split Cas9, i.e., to form a structure of N—[N-terminal portion of the split Cas9]-[intein-N]—C. In some embodiments, an intein-C is fused to the N-terminus of the C-terminal portion of the split Cas9, i.e., to form a structure of N-[intein-C]—[C-terminal portion of the split Cas9]-C. In embodiments, a base editor is encoded by two polynucleotides, where one polynucleotide encodes a fragment of the base editor fused to an intein-N and another polynucleotide encodes a fragment of the base editor fused to an intein-C. Methods for designing and using inteins are known in the art and described, for example by WO2014004336, WO2017132580, WO2013045632A1, US20150344549, and US20180127780, each of which is incorporated herein by reference in their entirety.

[0316] In some embodiments, an ABE was split into N- and C-terminal fragments at Ala, Ser, Thr, or Cys residues within selected regions of SpCas9. These regions correspond to loop regions identified by Cas9 crystal structure analysis.

[0317] The N-terminus of each fragment is fused to an intein-N and the C-terminus of each fragment is fused to an intein C at amino acid positions S303, T310, T313, S355, A456, S460, A463, T466, S469, T472, T474, C574, S577, A589, and S590, referenced to SEQ ID NO: 197.

### Pharmaceutical Compositions

[0318] In some aspects, the present invention provides a pharmaceutical composition comprising any of the polynucleotides, vectors, base editors, base editor systems, guide polynucleotides (e.g., the gRNAs listed in Table 1 or guide polynucleotides containing any of the spacers listed in Table 2, or fragments or extensions thereof), fusion proteins, complexes, or the fusion protein-guide polynucleotide complexes described herein.

[0319] The pharmaceutical compositions of the present invention can be prepared in accordance with known techniques. See, e.g., Remington, The Science and Practice of Pharmacy (21st ed. 2005). In general, a base editor, base editory system, guide RNA(s), or polynucleotides encoding the same, is admixed with a suitable carrier prior to administration or storage, and in some embodiments, the pharmaceutical composition further comprises a pharmaceutically acceptable carrier. Suitable pharmaceutically acceptable carriers generally comprise inert substances that aid in administering the pharmaceutical composition to a subject, aid in processing the pharmaceutical compositions into deliverable preparations, or aid in storing the pharmaceutical composition prior to administration. Pharmaceutically acceptable carriers can include agents that can stabilize, optimize or otherwise alter the form, consistency, viscosity, pH, pharmacokinetics, solubility of the formulation. Such agents include buffering agents, wetting agents, emulsifying agents, diluents, encapsulating agents, and skin penetration enhancers. For example, carriers can include, but are not limited to, saline, buffered saline, dextrose, arginine, sucrose, water, glycerol, ethanol, sorbitol, dextran, sodium carboxymethyl cellulose, and combinations thereof.

[0320] In some embodiments, the pharmaceutical composition is formulated for delivery to a subject. Suitable routes of administrating the pharmaceutical composition described herein include, without limitation: topical, subcutaneous, transdermal, intradermal, intralesional, intraarticular, intraperitoneal, intravesical, transmucosal, gingival, intradental, intracochlear, transtympanic, intraorgan, epidural, intrathecal, intramuscular, intravenous, intravascular, intraosseus, periocular, intratumoral, intracerebral, and intracerebroventricular administration.

[0321] In some embodiments, the pharmaceutical composition described herein is administered locally to a diseased site (e.g., an eye, such as the retina of an eye). In some embodiments, the pharmaceutical composition described herein is administered to a subject by injection, by means of a catheter, by means of a suppository, or by means of an implant, the implant being of a porous, non-porous, or gelatinous material, including a membrane, such as a sialastic membrane, or a fiber.

[0322] In some embodiments, any of the fusion proteins, gRNAs, and/or complexes described herein are provided as part of a pharmaceutical composition. In some embodiments, the pharmaceutical composition comprises any of the fusion proteins or complexes provided herein. In some embodiments pharmaceutical composition comprises a gRNA, a nucleic acid programmable DNA binding protein, a cationic lipid, and a pharmaceutically acceptable excipient. In embodiments, pharmaceutical compositions comprise a lipid nanoparticle and a pharmaceutically acceptable excipient. In embodiments, the lipid nanoparticle contains a gRNA, a base editor, a complex, a base editor system, or a component thereof of the present disclosure, and/or one or more polynucleotides encoding the same. Pharmaceutical compositions can optionally comprise one or more additional therapeutically active substances.

[0323] The compositions, as described above, can be administered in effective amounts. The effective amount will depend upon the mode of administration, the particular condition being treated, and the desired outcome. It may also depend upon the stage of the condition, the age and physical condition of the subject, the nature of concurrent therapy, if any, and like factors well-known to the medical practitioner. For therapeutic applications, it is that amount sufficient to achieve a medically desirable result.

[0324] In some embodiments, compositions in accordance with the present disclosure can be used for treatment of any of a variety of diseases, disorders, and/or conditions.

### Methods of Treatment

[0325] Some aspects of the present invention provide methods of treating a subject in need, the method comprising administering to a subject in need an effective therapeutic amount of a pharmaceutical composition as described herein. More specifically, the methods of treatment include administering to a subject in need thereof one or more pharmaceutical compositions comprising a base editor or a polynucleotide encoding the base editor (e.g., a CBE, ABE, or CABE) and a guide polynucleotide (e.g., a guide RNA listed in Table 1 or a guide RNA containing a spacer listed in Table 2) of the present disclosure. In other embodiments, the methods of the invention comprise expressing or introducing into a cell a base editor polypeptide and one or more guide RNAs capable of targeting a nucleic acid molecule encoding at least one polypeptide.

[0326] The methods herein include administering to a subject (including a subject identified as being in need of such treatment, or a subject suspected of being at risk of disease and in need of such treatment) an effective amount of a composition described herein. In various embodiments, a composition described herein is administered to a subject by subretinal or subfovial injection. In some instances, subretinal injection involves the formation of a bleb in the fovea. Identifying a subject in need of such treatment can be in the judgment of a subject or a health care professional and can be subjective (e.g., opinion) or objective (e.g., measurable by a test or diagnostic method).

[0327] One of ordinary skill in the art would recognize that multiple administrations of the pharmaceutical compositions contemplated in particular embodiments may be required to affect the desired therapy. For example, a composition may be administered to the subject 1, 2, 3, 4, 5, 6, 7, 8, 9, or 10 or more times over a span of 1 week, 2 weeks, 3 weeks, 1 month, 2 months, 3 months, 4 months, 5 months, 6 months, 1 year, 2 years, 5, years, 10 years, or more.

[0328] Administration of the pharmaceutical compositions contemplated herein may be carried out using conventional techniques including, but not limited to, infusion, transfusion, or parenterally. In some embodiments, parenteral administration includes infusing or injecting intravascularly, intravenously, intramuscularly, intraarterially, intrathecally, intratumorally, intradermally, intraperitoneally, transtracheally, subcutaneously, subcuticularly, intraarticularly, subcapsularly, subarachnoidly and intrasternally.

[0329] Provided herein are methods of treating a disease or disorder with a composition or system, e.g., a base editor system or a base editor protein, described herein. Optionally, the base editor system described herein can be combined with one or more other treatments. In one aspect, provided herein is a method of treating Leber's Congenital Amaurosis-10 (LCA10) in a subject in need thereof by administering a base editor described herein, or a polynucleotide(s) encoding the same.

[0330] The response in individual subjects can be characterized as a complete response, a partial response, or stable disease. In some embodiments, the response is a partial response (PR). In some embodiments, the response is a complete response (CR). In some embodiments, the response results in preserved or improved vision of the subject (e.g., stable disease).

[0331] In some embodiments, the treatment results in improved or preserved vision over time in the human subject as compared to the expected survival time of the human subject if the human subject was not treated with the compound, e.g. the base editor system. In some embodiments preserved vision involves slowed progression of the disease compared to a subject not treated with the compositions or according to the methods provided herein.

[0332] In some embodiments, the human subject to be treated with the described methods is a child (e.g., 0-18 years of age). In other embodiments, the human subject to be treated with the described methods is an adult (e.g., 18+ years of age). In some embodiments, the subject is a neonate. In some embodiments, the subject is about or at least about 0 days, 1 day, 2 days, 3 days, 4 days, 5 days, 6 days, 7 days, 1 month, 2 months, 3 months, 4 months, 5 months, 6 months, 1 year, 2 years, 3 years, 4 years, 5 years, 6 years, 7 years, 8 years, 9 years, 10 years, 11 years, 12 years, 13 years, 14 years, 15 years, 16 years, 17 years, 18 years, 19 years, 20 years, 30 years, or 40 years old. In some embodiments, the subject is no more than about 1 day, 2 days, 3 days, 4 days, 5 days, 6 days, 7 days, 1 month, 2 months, 3 months, 4 months, 5 months, 6 months, 1 year, 2 years, 3 years, 4 years, 5 years, 6 years, 7 years, 8 years, 9 years, 10 years, 11 years, 12 years, 13 years, 14 years, 15 years, 16 years, 17 years, 18 years, 19 years, 20 years, 30 years, or 40 years old.

### Kits

[0333] The invention provides kits for the treatment of Leber's Congenital Amaurosis-10 (LCA10) in a subject. In some embodiments, the kit includes a base editor system or a polynucleotide encoding a base editor system, wherein the base editor polypeptide system a nucleic acid programmable DNA binding protein (napDNAbp), a deaminase, and a guide RNA. In some embodiments, the napDNAbp is Cas9 or Cas12. In some embodiments, the polynucleotide encoding the base editor is a mRNA sequence. In some embodiments, the deaminase is a cytidine deaminase or an adenosine deaminase.

[0334] The kits may further comprise written instructions for using a base editor or base editor system as described herein. In other embodiments, the instructions include at least one of the following: precautions; warnings; clinical studies; and/or references. The instructions may be printed directly on the container (when present), or as a label applied to the container, or as a separate sheet, pamphlet, card, or folder supplied in or with the container. In a further embodiment, a kit comprises instructions in the form of a label or separate insert (package insert) for suitable operational parameters. In yet another embodiment, the kit comprises one or more containers with appropriate positive and negative controls or control samples, to be used as standard(s) for detection, calibration, or normalization. The kit can further comprise a second container comprising a pharmaceutically-acceptable buffer, such as (sterile) phosphate-buffered saline, Ringer's solution, or dextrose solution. It can further include other materials desirable from a commercial and user standpoint, including other buffers, diluents, filters, needles, syringes, and package inserts with instructions for use.

[0335] The practice of the present invention employs, unless otherwise indicated, conventional techniques of molecular biology (including recombinant techniques), microbiology, cell biology, biochemistry and immunology, which are well within the purview of the skilled artisan. Such techniques are explained fully in the literature, such as, “Molecular Cloning: A Laboratory Manual”, second edition (Sambrook, 1989); “Oligonucleotide Synthesis” (Gait, 1984); “Animal Cell Culture” (Freshney, 1987); “Methods in Enzymology” “Handbook of Experimental Immunology” (Weir, 1996); “Gene Transfer Vectors for Mammalian Cells” (Miller and Calos, 1987); “Current Protocols in Molecular Biology” (Ausubel, 1987); “PCR: The Polymerase Chain Reaction”, (Mullis, 1994); “Current Protocols in Immunology” (Coligan, 1991). These techniques are applicable to the production of the polynucleotides and polypeptides of the invention, and, as such, may be considered in making and practicing the invention. Particularly useful techniques for particular embodiments will be discussed in the sections that follow.

[0336] The following examples are put forth so as to provide those of ordinary skill in the art with a complete disclosure and description of how to make and use the assay, screening, and therapeutic methods of the invention, and are not intended to limit the scope of what the inventors regard as their invention.

### EXAMPLES

### Example 1: Screening of Guides for Use in Direct Correction of the Leber's Congenital Amaurosis-10 (LCA10) IVS26 Mutation (CEP290 c.2991+1655A>G)

[0337] Experiments were undertaken to evaluate the feasibility of using base editing to directly correct the pathogenic IVS26 mutation (CEP290 c.2991+1655A>G) mutation by deaminating the cytidine (C) complementary to the pathogenic guanine (G). Guide RNAs were prepared for targeting a rat APOBEC (rAPOBEC) BE4 cytidine base editor to deaminate the target cytidine (i.e., the cytidine (C) labeled with the subscript “7” in the following sequence: ATAC₇TC₉AC₁₁AATTACAACTGG (SEQ ID NO: 481)). Guide RNAs were evaluated that had lengths of 18, 19, 21, 22, or 23 nucleotides, and guides were also evaluated that contained spacers of the same lengths and also a self-cleaving hammerhead ribozyme (HRz) (FIG. 4 and Table 1). In a first base editing experiment, base editing was evaluated in IVS26 lenti-integrated HEK293T cells (see below Methods). The IVS26 lenti-integrated HEK293T cells were contacted with a plasmid encoding a rat APOBEC (rAPOBEC) BE4 editor expressed under the control of a CMV promoter and with a plasmid encoding a guide RNA expressed under the control of a U6 promoter. The guide RNAs containing spacers with lengths of 18, 19, and 21 nucleotides performed the best, achieving percent C>T conversions of ˜25% (FIG. 4). The base editing experiment was repeated in a second base editing experiment with the inclusion of a guide RNA containing a 20 nucleotide spacer and omitting the guides containing the hammerhead ribozymes (HR_{ZS}) (FIG. 5). This second base editing experiment resulted in overall editing efficiencies of around 45% for the guide RNAs containing 18, 19, 20 and 21 nucleotide spacers.

### Example 2: Screening of Cytidine Deaminase Base Editors for Use in Direct Correction of the Leber's Congenital Amaurosis-10 (LCA10) IVS26 Mutation (CEP290 c.2991+1655A>G)

[0338] Experiments were undertaken to evaluate five different BE4 cytidine deaminase base editors each containing a different cytidine deaminase domain, namely rAPOBEC, ppAPOBEC, RrA3F, AmAPOBEC1, or SsAPOBEC3B, where “rAPOBEC” indicates a base editor containing “rat APOBEC,” “ppAPOBEC” indicates a base editor containing “Pongo pygmaeus (Orangutan) APOBEC,” RrA3F indicates a base editor containing “Rhinopithecus roxellana (golden snub-nosed monkey) APOBEC3F (A3F),” “AmAPOBEC1” indicates a base editor containing “Alligator mississippiensis (American alligator) APOBEC1,” and SsAPOBEC3B indicates a base editor containing “Sus scrofa (pig) APOBEC3B” (see Yu, Y., et al. (2020). Cytosine base editors with minimized unguided DNA and RNA off-target events and high on-target activity. Nat Commun, 11:2052, the disclosure of which is incorporated herein by reference in its entirety for all purposes). Off-target base bystander base editing was compared between the five BE4 cytidine deaminase base editors. Guide RNAs were prepared for targeting the BE4 cytidine deaminase base editors to deaminate a target cytidine (i.e., the cytidine (C) labeled with the subscript “7” in the following sequence: ATAC₇TC₉AC₁₁AATTACAACTGG (SEQ ID NO: 481), where locations of the off-target C9T and C11T base edits are indicated by the subscripts 9 and 11, respectively). The guides contained spacers with lengths of 19, 20, or 21 nucleotides (see FIG. 6 and Table 1). An optimal base editor would minimize C9T bystander edits while maintaining or increasing target C7T base edits.

[0339] The BE4 cytidine deaminases were each introduced to IVS26 lenti-integrated HEK293T cells as split base editors containing a Cfa(GEP) split intein, where each editor was split between the amino acid residues corresponding Glu573 and Cys574 of Cas9. The split editors were encoded by two separate plasmids and the IVS26 lenti-integrated HEK293T cells were co-transfected with two plasmids collectively encoding each split base editor. Each portion/split of each split base editor was expressed from a CMV promoter. The guide RNA used with each split base editor was encoded under the control of a U6 promoter on the vector that also encoded the C-terminal split of each base editor.

[0340] The ppAPOBEC, RrA3F, AmAPOBEC1, and SsAPOBEC3B BE4 base editors had reduced bystander C9T editing relative to the rAPOBEC BE4 base editor (FIG. 6). In particular, the ppAPOBEC base editor showed reduced levels of the bystander C9T edit (55%>35%) and improved on-target C7T editing (66%>75%).

### Example 3: Screening of Guides for Use in Disruption of a Cryptic Splice Donor Site Upstream of the IVS26 Mutation (CEP290 c.2991+1655A>G) to Treat Leber's Congenital Amaurosis-10 (LCA10)

[0341] Experiments were undertaken to evaluate the feasibility of using base editing to disrupt a cryptic splice donor site upstream of the IVS26 Mutation (CEP290 c.2991+1655A>G). First, two NGG PAM sequences were identified near the cryptic splice donor site (FIGS. 2B and 3A) upstream of the IVS26 that would allow for targeting an rAPOBEC BE4 cytidine deaminase base editor to deaminate C9 in the following sequence AC₅TC₇AC₉AATTACAACTGGGG (Site 1; SEQ ID NO: 482) or C4 in the following sequence CTC₂AC₄AATTAC₁₀AAC₁₃TGGGGCC (Site 2; SEQ ID NO: 483), respectively, in IVS26 lenti-integrated HEK293T cells. Guide RNAs were prepared with spacer lengths of 18 nt, 19 nt, 20 nt, 21 nt, 22 nt, or 23 nt to target the BE4 cytidine deaminase base editor to deaminase C9 at site 1 or C4 at site 2 (see Table 1 and FIGS. 7 and 8). The IVS26 lenti-integrated HEK293T cells were contacted with a plasmid encoding a guide RNA expressed under the control of a U6 promoter and a plasmid encoding the rAPOBEC BE4 cytidine deaminase base editor expressed under the control of a CMV promoter.

[0342] At Site 1 (FIG. 7), editing occurred at the disease allele (C5) and a bystander edit was observed at C7 (i.e., C5T). At Site 2 (FIG. 8), a favorable base editing profile was observed with editing taking place primarily at the target C4 site and at the C2 site. At Site 2 (FIG. 8), the 19 nucleotide guide had editing efficiency of ˜35% at the desired cryptic splice donor site with minimal bystander editing.

[0343] The above-described Examples demonstrate the feasibility of using cytidine base editors to treat Leber's Congenital Amaurosis-10 through correcting the pathogenic IVS26 mutation back to the wild type form, and/or through disruption of a splice donor site near the IVS26 mutation. Both of these alterations can prevent missplicing of mRNA transcribed from the CEP290 gene. In embodiments, an adenosine deaminase base editor is used to disrupt the splice donor site. Cytidine deaminase base editors (e.g., ppAPOBEC) were used in combination with length-optimized guide RNAs to reach editing efficiencies as high as 75% for correcting the IVS26 mutation. Cytidine deaminase base editors were used in combination with length-optimized guide RNAs to disrupt the splice site with editing efficiencies of up to 35% with minimal or no detectable bystander edits.

[0344] The following materials and methods were employed in the above examples.

### Lenti-Integrated HEK293T Cells

[0345] Leber's Congenital Amaurosis-10 (LCA10) is associated with a CEP290 c.2991+1655A>G mutation (the IVS26 mutation), which results in the introduction of a cryptic splice donor site within an intron of CEP290. The cryptic splice donor site results in the retention of a ˜128 base pair sequence from an intron of the CEP290 following splicing of an mRNA transcript transcribed from the mutated CEP290 gene (FIGS. 1A and 1B). A ˜300 bp region of interest (ROI) containing the following nucleotide sequence gggtttcaccttgttagccaggatggtgtcgatctcctgaactcgtgatccacccgcctcgg cctcctaaagtgctgggattaCAGATGTGAGccaccGCACCTGGCCCCAGTTGTAATTGTGA gTATCTCATACCTATCCCTATTGGCAGTGTCTTAGTTTTATTTTTTATTATCTTTATTGTGG CAGCCATTATTCCTGTCTCTATCTCCAGTCTTACATCCTCCTTACTGCCACAAGAATGATCA TT, where the pathogenic IVS26 mutation is in boldface and underlined; SEQ ID NO: 488, was randomly integrated into the genomes of HEK293T cells (FIGS. 3A and 3B) to prepare IVS26 lenti-integrated HEK293T cells suitable for use in evaluating base editing to treat LCA10. In the HEK293T cells, base editing was used to correct the IVS26 mutation using a cytidine base editor to target the C complementary to the pathogenic G base (FIGS. 2A and 3A), causing a reversion to the wild type A (FIGS. 2A and 3A). Additionally, in the IVS26 lenti-integrated HEK293T cells, 3 and 4 base pairs upstream of the IVS26 mutation, there was a “GT” splice donor site, that corresponds to a cryptic splice donor site that results in retention of the ˜128 base pair sequence following transcript splicing in subjects with LCA10 (FIGS. 2B, 3A and 3B). A and C bases complementary to this “GT” splice donor were targeted using cytidine deaminase base editors to disrupt the splice donor site. Cytidine deaminase base editors, adenosine deaminase base editors, and/or CABEs can be used to disrupt the splice donor site.

### Transfection and Base Editing

[0346] CEP290 c.2991+1655A>G (IVS26) lenti-integrated HEK293T cells were seeded at a density of 40,000 cells per well in a 48 well plate. All transfections were performed in triplicate or quadruplicate using Lipofectamine 2000 (1.5 μL of reagent per 1 μg of DNA transfected). For each transfection 750 ng of editor DNA and 250 ng of guide RNA plasmid. Reagent mixtures, which included plasmids encoding a base editor (BE4) and a guide polynucleotide, were added to the wells. Media was replaced every 48 hours over a 5-day (120 hour) period and cells were then lysed. Editing was measured 5 days post transfection. For lysing the cells, the media was removed and cell lysis buffer was added to the wells (10 mM Tris HCl (pH 8.0)+0.05% SDS+100 μg/mL Proteinase K) in an amount sufficient for gDNA extraction to allow for sequencing of a genomic site of interest. The plate was incubated at 55° C. for 1 hour and was then heat inactivated at 95° C. for 20 minutes. Samples were then stored in the −20° C. freezer.

### Sequencing

[0347] Cell lysate (2 μL) or cDNA was added to a 25 μL PCR reaction containing Q5 Hot Start HiFi 2× Master Mix and 0.5 μM of each primer containing 5′ Illumina adapter overhangs. PCR reactions were carried out as follows: 95° C. for 2 min, 30 cycles of (95° C. for 15 s, 65° C. for 20 s, and 72° C. for 20 s), and a final 72° C. extension for 2 min. Following amplification, 2 μL of the crude PCR products containing an amplified genomic site of interest were barcoded using 0.5 μM of each unique Illumina barcoding primer pairs and Q5 Hot Start High-Fidelity 2× Master Mix in a total volume of 25 μL. The reactions were carried out as follows: 98° C. for 2 min, 10 cycles of (98° C. for 20 s, 60° C. for 30 s, and 72° C. for 30 s), and a final 72° C. extension for 2 min. Equal volumes of barcoded PCR products were then pooled and cleaned up using SPRISelect paramagnetic beads (Beckman Coulter) using a 0.6× bead/sample ratio. Eluted DNA concentration was quantified with a Qubit 4 (Thermo Fisher Scientific) and was sequenced with an Illumina MiSeq instrument according to the manufacturer's protocol.

### OTHER EMBODIMENTS

[0348] From the foregoing description, it will be apparent that variations and modifications may be made to the invention described herein to adopt it to various usages and conditions. Such embodiments are also within the scope of the following claims.

[0349] The recitation of a listing of elements in any definition of a variable herein includes definitions of that variable as any single element or combination (or subcombination) of listed elements. The recitation of an embodiment herein includes that embodiment as any single embodiment or in combination with any other embodiments or portions thereof.

[0350] All patents and publications mentioned in this specification are herein incorporated by reference to the same extent as if each independent patent and publication was specifically and individually indicated to be incorporated by reference.

The application's sequence listing, which the Patent Office published only in electronic form, follows.

SEQUENCE LISTING (513 sequences)

SEQ ID NO: 1 - protein, 167 aa, Escherichia coli
  REGION 1..167: note = misc_feature - TadA*7.10 (ecTadA) polypeptide sequence
MSEVEFSHEYWMRHALTLAKRARDEREVPVGAVLVLNNRVIGEGWNRAIGLHDPTAHAEIMALRQGGLVMQNYRLIDATLYVTFEPCVMCAGAMIHSRIGRVVFGVRNAKTGAAGSLMDVLHYPGMNHRVEITEGILADECAALLCYFFRMPRQVFNAQKKAQSSTD

SEQ ID NO: 2 - DNA, 4092 bp, synthetic construct
  misc_feature 1..4092: note = BhCas12b GGSGGS-ABE8-Xten20at P153 polynucleotide sequence
  misc_feature 1..6: note = Kozak sequence
  misc_feature 7..57: note = Sequence encoding N-terminal nuclear localization signal
  misc_feature 58..513: note = Sequence encoding BhCas12b
  misc_feature 514..531: note = Sequence encoding a linker
  misc_feature 532..1029: note = Sequence encoding TadA*8
  misc_feature 1030..1089: note = Sequence encoding Xten20 linker
  misc_feature 1090..3954: note = Sequence encoding BhCas12b
  misc_feature 3955..4002: note = Sequence encoding C-terminal NLS
  misc_feature 4003..4008: note = Sequence encoding GS linker
  misc_feature 4009..4089: note = Sequence encoding 3x hemagglutinin (HA) tag
  source 1..4092: mol_type = other DNA
gccaccatggccccaaagaagaagcggaaggtcggtatccacggagtcccagcagccgccaccagatccttcatcctgaagatcgagcccaacgaggaagtgaagaaaggcctctggaaaacccacgaggtgctgaaccacggaatcgcctactacatgaatatcctgaagctgatccggcaagaggccatctacgagcaccacgagcaggaccccaagaatcccaagaaggtgtccaaggccgagatccaggccgagctgtgggatttcgtgctgaagatgcagaagtgcaacagcttcacacacgaggtggacaaggacgaggtgttcaacatcctgagagagctgtacgaggaactggtgcccagcagcgtggaaaagaagggcgaagccaaccagctgagcaacaagtttctgtaccctctggtggaccccaacagccagtctggaaagggaacagccagcagcggcagaaagcccagatggtacaacctgaagattgccggcgatcccggaggctctggaggaagctccgaagtcgagttttcccatgagtactggatgagacacgcattgactctcgcaaagagggctcgagatgaacgcgaggtgcccgtgggggcagtactcgtgctcaacaatcgcgtaatcggcgaaggttggaatagggcaatcggactccacgaccccactgcacatgcggaaatcatggcccttcgacagggagggcttgtgatgcagaattatcgactttatgatgcgacgctgtacgtcacgtttgaaccttgcgtaatgtgcgcgggagctatgattcactcccgcattggacgagttgtattcggtgttcgcaacgccaagacgggtgccgcaggttcactgatggacgtgctgcatcatccaggcatgaaccaccgggtagaaatcacagaaggcatattggcggacgaatgtgcggcgctgttgtgtcgtttttttcgcatgcccaggcgggtctttaacgcccagaaaaaagcacaatcctctactgacggctcttctggatctgaaacacctggcacaagcgagagcgccacccctgagagctctggctcctgggaagaagagaagaagaagtgggaagaagataagaaaaaggacccgctggccaagatcctgggcaagctggctgagtacggactgatccctctgttcatcccctacaccgacagcaacgagcccatcgtgaaagaaatcaagtggatggaaaagtcccggaaccagagcgtgcggcggctggataaggacatgttcattcaggccctggaacggttcctgagctgggagagctggaacctgaaagtgaaagaggaatacgagaaggtcgagaaagagtacaagaccctggaagagaggatcaaagaggacatccaggctctgaaggctctggaacagtatgagaaagagcggcaagaacagctgctgcgggacaccctgaacaccaacgagtaccggctgagcaagagaggccttagaggctggcgggaaatcatccagaaatggctgaaaatggacgagaacgagccctccgagaagtacctggaagtgttcaaggactaccagcggaagcaccctagagaggccggcgattacagcgtgtacgagttcctgtccaagaaagagaaccacttcatctggcggaatcaccctgagtacccctacctgtacgccaccttctgcgagatcgacaagaaaaagaaggacgccaagcagcaggccaccttcacactggccgatcctatcaatcaccctctgtgggtccgattcgaggaaagaagcggcagcaacctgaacaagtacagaatcctgaccgagcagctgcacaccgagaagctgaagaaaaagctgacagtgcagctggaccggctgatctaccctacagaatctggcggctgggaagagaagggcaaagtggacattgtgctgctgcccagccggcagttctacaaccagatcttcctggacatcgaggaaaagggcaagcacgccttcacctacaaggatgagagcatcaagttccctctgaagggcacactcggcggagccagagtgcagttcgacagagatcacctgagaagataccctcacaaggtggaaagcggcaacgtgggcagaatctacttcaacatgaccgtgaacatcgagcctacagagtccccagtgtccaagtctctgaagatccaccgggacgacttccccaaggtggtcaacttcaagcccaaagaactgaccgagtggatcaaggacagcaagggcaagaaactgaagtccggcatcgagtccctggaaatcggcctgagagtgatgagcatcgacctgggacagagacaggccgctgccgcctctattttcgaggtggtggatcagaagcccgacatcgaaggcaagctgtttttcccaatcaagggcaccgagctgtatgccgtgcacagagccagcttcaacatcaagctgcccggcgagacactggtcaagagcagagaagtgctgcggaaggccagagaggacaatctgaaactgatgaaccagaagctcaacttcctgcggaacgtgctgcacttccagcagttcgaggacatcaccgagagagagaagcgggtcaccaagtggatcagcagacaagagaacagcgacgtgcccctggtgtaccaggatgagctgatccagatccgcgagctgatgtacaagccttacaaggactgggtcgccttcctgaagcagctccacaagagactggaagtcgagatcggcaaagaagtgaagcactggcggaagtccctgagcgacggaagaaagggcctgtacggcatctccctgaagaacatcgacgagatcgatcggacccggaagttcctgctgagatggtccctgaggcctaccgaacctggcgaagtgcgtagactggaacccggccagagattcgccatcgaccagctgaatcacctgaacgccctgaaagaagatcggctgaagaagatggccaacaccatcatcatgcacgccctgggctactgctacgacgtgcggaagaagaaatggcaggctaagaaccccgcctgccagatcatcctgttcgaggatctgagcaactacaacccctacgaggaaaggtcccgcttcgagaacagcaagctcatgaagtggtccagacgcgagatccccagacaggttgcactgcagggcgagatctatggcctgcaagtgggagaagtgggcgctcagttcagcagcagattccacgccaagacaggcagccctggcatcagatgtagcgtcgtgaccaaagagaagctgcaggacaatcggttcttcaagaatctgcagagagagggcagactgaccctggacaaaatcgccgtgctgaaagagggcgatctgtacccagacaaaggcggcgagaagttcatcagcctgagcaaggatcggaagtgcgtgaccacacacgccgacatcaacgccgctcagaacctgcagaagcggttctggacaagaacccacggcttctacaaggtgtactgcaaggcctaccaggtggacggccagaccgtgtacatccctgagagcaaggaccagaagcagaagatcatcgaagagttcggcgagggctacttcattctgaaggacggggtgtacgaatgggtcaacgccggcaagctgaaaatcaagaagggcagctccaagcagagcagcagcgagctggtggatagcgacatcctgaaagacagcttcgacctggcctccgagctgaaaggcgaaaagctgatgctgtacagggaccccagcggcaatgtgttccccagcgacaaatggatggccgctggcgtgttcttcggaaagctggaacgcatcctgatcagcaagctgaccaaccagtactccatcagcaccatcgaggacgacagcagcaagcagtctatgaaaaggccggcggccacgaaaaaggccggccaggcaaaaaagaaaaagggatcctacccatacgatgttccagattacgcttatccctacgacgtgcctgattatgcatacccatatgatgtccccgactatgcctaa

SEQ ID NO: 3 - protein, 1361 aa, synthetic construct
  REGION 1..1361: note = BhCas12b GGSGGS-ABE8-Xten20at P153 polypeptide sequence
MAPKKKRKVGIHGVPAAATRSFILKIEPNEEVKKGLWKTHEVLNHGIAYYMNILKLIRQEAIYEHHEQDPKNPKKVSKAEIQAELWDFVLKMQKCNSFTHEVDKDEVFNILRELYEELVPSSVEKKGEANQLSNKFLYPLVDPNSQSGKGTASSGRKPRWYNLKIAGDPGGSGGSSEVEFSHEYWMRHALTLAKRARDEREVPVGAVLVLNNRVIGEGWNRAIGLHDPTAHAEIMALRQGGLVMQNYRLYDATLYVTFEPCVMCAGAMIHSRIGRVVFGVRNAKTGAAGSLMDVLHHPGMNHRVEITEGILADECAALLCRFFRMPRRVFNAQKKAQSSTDGSSGSETPGTSESATPESSGSWEEEKKKWEEDKKKDPLAKILGKLAEYGLIPLFIPYTDSNEPIVKEIKWMEKSRNQSVRRLDKDMFIQALERFLSWESWNLKVKEEYEKVEKEYKTLEERIKEDIQALKALEQYEKERQEQLLRDTLNTNEYRLSKRGLRGWREIIQKWLKMDENEPSEKYLEVFKDYQRKHPREAGDYSVYEFLSKKENHFIWRNHPEYPYLYATFCEIDKKKKDAKQQATFTLADPINHPLWVRFEERSGSNLNKYRILTEQLHTEKLKKKLTVQLDRLIYPTESGGWEEKGKVDIVLLPSRQFYNQIFLDIEEKGKHAFTYKDESIKFPLKGTLGGARVQFDRDHLRRYPHKVESGNVGRIYFNMTVNIEPTESPVSKSLKIHRDDFPKVVNFKPKELTEWIKDSKGKKLKSGIESLEIGLRVMSIDLGQRQAAAASIFEVVDQKPDIEGKLFFPIKGTELYAVHRASFNIKLPGETLVKSREVLRKAREDNLKLMNQKLNFLRNVLHFQQFEDITEREKRVTKWISRQENSDVPLVYQDELIQIRELMYKPYKDWVAFLKQLHKRLEVEIGKEVKHWRKSLSDGRKGLYGISLKNIDEIDRTRKFLLRWSLRPTEPGEVRRLEPGQRFAIDQLNHLNALKEDRLKKMANTIIMHALGYCYDVRKKKWQAKNPACQIILFEDLSNYNPYEERSRFENSKLMKWSRREIPRQVALQGEIYGLQVGEVGAQFSSRFHAKTGSPGIRCSVVTKEKLQDNRFFKNLQREGRLTLDKIAVLKEGDLYPDKGGEKFISLSKDRKCVTTHADINAAQNLQKRFWTRTHGFYKVYCKAYQVDGQTVYIPESKDQKQKIIEEFGEGYFILKDGVYEWVNAGKLKIKKGSSKQSSSELVDSDILKDSFDLASELKGEKLMLYRDPSGNVFPSDKWMAAGVFFGKLERILISKLTNQYSISTIEDDSSKQSMKRPAATKKAGQAKKKKGSYPYDVPDYAYPYDVPDYAYPYDVPDYA

SEQ ID NO: 4 - DNA, 4092 bp, synthetic construct
  misc_feature 1..4092: note = BhCas12b GGSGGS-ABE8-Xten20at K255 polynucleotide sequence
  misc_feature 1..6: note = Kozak sequence
  misc_feature 7..57: note = Sequence encoding N-terminal nuclear localization signal (NLS)
  misc_feature 58..822: note = Sequence encoding BhCas12b
  misc_feature 823..840: note = Sequence encoding a linker
  misc_feature 841..1338: note = Sequence encoding TadA*8
  misc_feature 1339..1398: note = Sequence encoding Xten20 linker
  misc_feature 1399..3954: note = Sequence encoding BhCas12b
  misc_feature 3955..4002: note = Sequence encoding C-terminal NLS
  misc_feature 4003..4008: note = Sequence encoding a GS linker
  misc_feature 4009..4089: note = Sequence encoding 3x hemagglutinin (HA) tag
  source 1..4092: mol_type = other DNA
gccaccatggccccaaagaagaagcggaaggtcggtatccacggagtcccagcagccgccaccagatccttcatcctgaagatcgagcccaacgaggaagtgaagaaaggcctctggaaaacccacgaggtgctgaaccacggaatcgcctactacatgaatatcctgaagctgatccggcaagaggccatctacgagcaccacgagcaggaccccaagaatcccaagaaggtgtccaaggccgagatccaggccgagctgtgggatttcgtgctgaagatgcagaagtgcaacagcttcacacacgaggtggacaaggacgaggtgttcaacatcctgagagagctgtacgaggaactggtgcccagcagcgtggaaaagaagggcgaagccaaccagctgagcaacaagtttctgtaccctctggtggaccccaacagccagtctggaaagggaacagccagcagcggcagaaagcccagatggtacaacctgaagattgccggcgatccctcctgggaagaagagaagaagaagtgggaagaagataagaaaaaggacccgctggccaagatcctgggcaagctggctgagtacggactgatccctctgttcatcccctacaccgacagcaacgagcccatcgtgaaagaaatcaagtggatggaaaagtcccggaaccagagcgtgcggcggctggataaggacatgttcattcaggccctggaacggttcctgagctgggagagctggaacctgaaagtgaaagaggaatacgagaaggtcgagaaagagtacaagaccctggaagagaggatcaaaggaggctctggaggaagctccgaagtcgagttttcccatgagtactggatgagacacgcattgactctcgcaaagagggctcgagatgaacgcgaggtgcccgtgggggcagtactcgtgctcaacaatcgcgtaatcggcgaaggttggaatagggcaatcggactccacgaccccactgcacatgcggaaatcatggcccttcgacagggagggcttgtgatgcagaattatcgactttatgatgcgacgctgtacgtcacgtttgaaccttgcgtaatgtgcgcgggagctatgattcactcccgcattggacgagttgtattcggtgttcgcaacgccaagacgggtgccgcaggttcactgatggacgtgctgcatcatccaggcatgaaccaccgggtagaaatcacagaaggcatattggcggacgaatgtgcggcgctgttgtgtcgtttttttcgcatgcccaggcgggtctttaacgcccagaaaaaagcacaatcctctactgacggctcttctggatctgaaacacctggcacaagcgagagcgccacccctgagagctctggcgaggacatccaggctctgaaggctctggaacagtatgagaaagagcggcaagaacagctgctgcgggacaccctgaacaccaacgagtaccggctgagcaagagaggccttagaggctggcgggaaatcatccagaaatggctgaaaatggacgagaacgagccctccgagaagtacctggaagtgttcaaggactaccagcggaagcaccctagagaggccggcgattacagcgtgtacgagttcctgtccaagaaagagaaccacttcatctggcggaatcaccctgagtacccctacctgtacgccaccttctgcgagatcgacaagaaaaagaaggacgccaagcagcaggccaccttcacactggccgatcctatcaatcaccctctgtgggtccgattcgaggaaagaagcggcagcaacctgaacaagtacagaatcctgaccgagcagctgcacaccgagaagctgaagaaaaagctgacagtgcagctggaccggctgatctaccctacagaatctggcggctgggaagagaagggcaaagtggacattgtgctgctgcccagccggcagttctacaaccagatcttcctggacatcgaggaaaagggcaagcacgccttcacctacaaggatgagagcatcaagttccctctgaagggcacactcggcggagccagagtgcagttcgacagagatcacctgagaagataccctcacaaggtggaaagcggcaacgtgggcagaatctacttcaacatgaccgtgaacatcgagcctacagagtccccagtgtccaagtctctgaagatccaccgggacgacttccccaaggtggtcaacttcaagcccaaagaactgaccgagtggatcaaggacagcaagggcaagaaactgaagtccggcatcgagtccctggaaatcggcctgagagtgatgagcatcgacctgggacagagacaggccgctgccgcctctattttcgaggtggtggatcagaagcccgacatcgaaggcaagctgtttttcccaatcaagggcaccgagctgtatgccgtgcacagagccagcttcaacatcaagctgcccggcgagacactggtcaagagcagagaagtgctgcggaaggccagagaggacaatctgaaactgatgaaccagaagctcaacttcctgcggaacgtgctgcacttccagcagttcgaggacatcaccgagagagagaagcgggtcaccaagtggatcagcagacaagagaacagcgacgtgcccctggtgtaccaggatgagctgatccagatccgcgagctgatgtacaagccttacaaggactgggtcgccttcctgaagcagctccacaagagactggaagtcgagatcggcaaagaagtgaagcactggcggaagtccctgagcgacggaagaaagggcctgtacggcatctccctgaagaacatcgacgagatcgatcggacccggaagttcctgctgagatggtccctgaggcctaccgaacctggcgaagtgcgtagactggaacccggccagagattcgccatcgaccagctgaatcacctgaacgccctgaaagaagatcggctgaagaagatggccaacaccatcatcatgcacgccctgggctactgctacgacgtgcggaagaagaaatggcaggctaagaaccccgcctgccagatcatcctgttcgaggatctgagcaactacaacccctacgaggaaaggtcccgcttcgagaacagcaagctcatgaagtggtccagacgcgagatccccagacaggttgcactgcagggcgagatctatggcctgcaagtgggagaagtgggcgctcagttcagcagcagattccacgccaagacaggcagccctggcatcagatgtagcgtcgtgaccaaagagaagctgcaggacaatcggttcttcaagaatctgcagagagagggcagactgaccctggacaaaatcgccgtgctgaaagagggcgatctgtacccagacaaaggcggcgagaagttcatcagcctgagcaaggatcggaagtgcgtgaccacacacgccgacatcaacgccgctcagaacctgcagaagcggttctggacaagaacccacggcttctacaaggtgtactgcaaggcctaccaggtggacggccagaccgtgtacatccctgagagcaaggaccagaagcagaagatcatcgaagagttcggcgagggctacttcattctgaaggacggggtgtacgaatgggtcaacgccggcaagctgaaaatcaagaagggcagctccaagcagagcagcagcgagctggtggatagcgacatcctgaaagacagcttcgacctggcctccgagctgaaaggcgaaaagctgatgctgtacagggaccccagcggcaatgtgttccccagcgacaaatggatggccgctggcgtgttcttcggaaagctggaacgcatcctgatcagcaagctgaccaaccagtactccatcagcaccatcgaggacgacagcagcaagcagtctatgaaaaggccggcggccacgaaaaaggccggccaggcaaaaaagaaaaagggatcctacccatacgatgttccagattacgcttatccctacgacgtgcctgattatgcatacccatatgatgtccccgactatgcctaa

SEQ ID NO: 5 - protein, 1361 aa, synthetic construct
  REGION 1..1361: note = BhCas12b GGSGGS-ABE8-Xten20at K255 polypeptide sequence
MAPKKKRKVGIHGVPAAATRSFILKIEPNEEVKKGLWKTHEVLNHGIAYYMNILKLIRQEAIYEHHEQDPKNPKKVSKAEIQAELWDFVLKMQKCNSFTHEVDKDEVFNILRELYEELVPSSVEKKGEANQLSNKFLYPLVDPNSQSGKGTASSGRKPRWYNLKIAGDPSWEEEKKKWEEDKKKDPLAKILGKLAEYGLIPLFIPYTDSNEPIVKEIKWMEKSRNQSVRRLDKDMFIQALERFLSWESWNLKVKEEYEKVEKEYKTLEERIKGGSGGSSEVEFSHEYWMRHALTLAKRARDEREVPVGAVLVLNNRVIGEGWNRAIGLHDPTAHAEIMALRQGGLVMQNYRLYDATLYVTFEPCVMCAGAMIHSRIGRVVFGVRNAKTGAAGSLMDVLHHPGMNHRVEITEGILADECAALLCRFFRMPRRVFNAQKKAQSSTDGSSGSETPGTSESATPESSGEDIQALKALEQYEKERQEQLLRDTLNTNEYRLSKRGLRGWREIIQKWLKMDENEPSEKYLEVFKDYQRKHPREAGDYSVYEFLSKKENHFIWRNHPEYPYLYATFCEIDKKKKDAKQQATFTLADPINHPLWVRFEERSGSNLNKYRILTEQLHTEKLKKKLTVQLDRLIYPTESGGWEEKGKVDIVLLPSRQFYNQIFLDIEEKGKHAFTYKDESIKFPLKGTLGGARVQFDRDHLRRYPHKVESGNVGRIYFNMTVNIEPTESPVSKSLKIHRDDFPKVVNFKPKELTEWIKDSKGKKLKSGIESLEIGLRVMSIDLGQRQAAAASIFEVVDQKPDIEGKLFFPIKGTELYAVHRASFNIKLPGETLVKSREVLRKAREDNLKLMNQKLNFLRNVLHFQQFEDITEREKRVTKWISRQENSDVPLVYQDELIQIRELMYKPYKDWVAFLKQLHKRLEVEIGKEVKHWRKSLSDGRKGLYGISLKNIDEIDRTRKFLLRWSLRPTEPGEVRRLEPGQRFAIDQLNHLNALKEDRLKKMANTIIMHALGYCYDVRKKKWQAKNPACQIILFEDLSNYNPYEERSRFENSKLMKWSRREIPRQVALQGEIYGLQVGEVGAQFSSRFHAKTGSPGIRCSVVTKEKLQDNRFFKNLQREGRLTLDKIAVLKEGDLYPDKGGEKFISLSKDRKCVTTHADINAAQNLQKRFWTRTHGFYKVYCKAYQVDGQTVYIPESKDQKQKIIEEFGEGYFILKDGVYEWVNAGKLKIKKGSSKQSSSELVDSDILKDSFDLASELKGEKLMLYRDPSGNVFPSDKWMAAGVFFGKLERILISKLTNQYSISTIEDDSSKQSMKRPAATKKAGQAKKKKGSYPYDVPDYAYPYDVPDYAYPYDVPDYA

SEQ ID NO: 6 - DNA, 4092 bp, synthetic construct
  misc_feature 1..4092: note = BhCas12b GGSGGS-ABE8-Xten20at D306 polynucleotide sequence
  misc_feature 1..6: note = Kozak sequence
  misc_feature 7..57: note = Sequence encoding N-terminal nuclear localization signal (NLS)
  misc_feature 58..975: note = Sequence encoding BhCas12b
  misc_feature 976..993: note = Sequence encoding a linker
  misc_feature 994..1491: note = Sequence encoding TadA*8
  misc_feature 1492..1551: note = Sequence encoding Xten20 linker
  misc_feature 1552..3954: note = Sequence encoding BhCas12b
  misc_feature 3955..4002: note = Sequence encoding C-terminal NLS
  misc_feature 4003..4008: note = Sequence encoding a GS linker
  misc_feature 4009..4089: note = Sequence encoding 3x hemagglutinin (HA) tag
  source 1..4092: mol_type = other DNA
gccaccatggccccaaagaagaagcggaaggtcggtatccacggagtcccagcagccgccaccagatccttcatcctgaagatcgagcccaacgaggaagtgaagaaaggcctctggaaaacccacgaggtgctgaaccacggaatcgcctactacatgaatatcctgaagctgatccggcaagaggccatctacgagcaccacgagcaggaccccaagaatcccaagaaggtgtccaaggccgagatccaggccgagctgtgggatttcgtgctgaagatgcagaagtgcaacagcttcacacacgaggtggacaaggacgaggtgttcaacatcctgagagagctgtacgaggaactggtgcccagcagcgtggaaaagaagggcgaagccaaccagctgagcaacaagtttctgtaccctctggtggaccccaacagccagtctggaaagggaacagccagcagcggcagaaagcccagatggtacaacctgaagattgccggcgatccctcctgggaagaagagaagaagaagtgggaagaagataagaaaaaggacccgctggccaagatcctgggcaagctggctgagtacggactgatccctctgttcatcccctacaccgacagcaacgagcccatcgtgaaagaaatcaagtggatggaaaagtcccggaaccagagcgtgcggcggctggataaggacatgttcattcaggccctggaacggttcctgagctgggagagctggaacctgaaagtgaaagaggaatacgagaaggtcgagaaagagtacaagaccctggaagagaggatcaaagaggacatccaggctctgaaggctctggaacagtatgagaaagagcggcaagaacagctgctgcgggacaccctgaacaccaacgagtaccggctgagcaagagaggccttagaggctggcgggaaatcatccagaaatggctgaaaatggacggaggctctggaggaagctccgaagtcgagttttcccatgagtactggatgagacacgcattgactctcgcaaagagggctcgagatgaacgcgaggtgcccgtgggggcagtactcgtgctcaacaatcgcgtaatcggcgaaggttggaatagggcaatcggactccacgaccccactgcacatgcggaaatcatggcccttcgacagggagggcttgtgatgcagaattatcgactttatgatgcgacgctgtacgtcacgtttgaaccttgcgtaatgtgcgcgggagctatgattcactcccgcattggacgagttgtattcggtgttcgcaacgccaagacgggtgccgcaggttcactgatggacgtgctgcatcatccaggcatgaaccaccgggtagaaatcacagaaggcatattggcggacgaatgtgcggcgctgttgtgtcgtttttttcgcatgcccaggcgggtctttaacgcccagaaaaaagcacaatcctctactgacggctcttctggatctgaaacacctggcacaagcgagagcgccacccctgagagctctggcgagaacgagccctccgagaagtacctggaagtgttcaaggactaccagcggaagcaccctagagaggccggcgattacagcgtgtacgagttcctgtccaagaaagagaaccacttcatctggcggaatcaccctgagtacccctacctgtacgccaccttctgcgagatcgacaagaaaaagaaggacgccaagcagcaggccaccttcacactggccgatcctatcaatcaccctctgtgggtccgattcgaggaaagaagcggcagcaacctgaacaagtacagaatcctgaccgagcagctgcacaccgagaagctgaagaaaaagctgacagtgcagctggaccggctgatctaccctacagaatctggcggctgggaagagaagggcaaagtggacattgtgctgctgcccagccggcagttctacaaccagatcttcctggacatcgaggaaaagggcaagcacgccttcacctacaaggatgagagcatcaagttccctctgaagggcacactcggcggagccagagtgcagttcgacagagatcacctgagaagataccctcacaaggtggaaagcggcaacgtgggcagaatctacttcaacatgaccgtgaacatcgagcctacagagtccccagtgtccaagtctctgaagatccaccgggacgacttccccaaggtggtcaacttcaagcccaaagaactgaccgagtggatcaaggacagcaagggcaagaaactgaagtccggcatcgagtccctggaaatcggcctgagagtgatgagcatcgacctgggacagagacaggccgctgccgcctctattttcgaggtggtggatcagaagcccgacatcgaaggcaagctgtttttcccaatcaagggcaccgagctgtatgccgtgcacagagccagcttcaacatcaagctgcccggcgagacactggtcaagagcagagaagtgctgcggaaggccagagaggacaatctgaaactgatgaaccagaagctcaacttcctgcggaacgtgctgcacttccagcagttcgaggacatcaccgagagagagaagcgggtcaccaagtggatcagcagacaagagaacagcgacgtgcccctggtgtaccaggatgagctgatccagatccgcgagctgatgtacaagccttacaaggactgggtcgccttcctgaagcagctccacaagagactggaagtcgagatcggcaaagaagtgaagcactggcggaagtccctgagcgacggaagaaagggcctgtacggcatctccctgaagaacatcgacgagatcgatcggacccggaagttcctgctgagatggtccctgaggcctaccgaacctggcgaagtgcgtagactggaacccggccagagattcgccatcgaccagctgaatcacctgaacgccctgaaagaagatcggctgaagaagatggccaacaccatcatcatgcacgccctgggctactgctacgacgtgcggaagaagaaatggcaggctaagaaccccgcctgccagatcatcctgttcgaggatctgagcaactacaacccctacgaggaaaggtcccgcttcgagaacagcaagctcatgaagtggtccagacgcgagatccccagacaggttgcactgcagggcgagatctatggcctgcaagtgggagaagtgggcgctcagttcagcagcagattccacgccaagacaggcagccctggcatcagatgtagcgtcgtgaccaaagagaagctgcaggacaatcggttcttcaagaatctgcagagagagggcagactgaccctggacaaaatcgccgtgctgaaagagggcgatctgtacccagacaaaggcggcgagaagttcatcagcctgagcaaggatcggaagtgcgtgaccacacacgccgacatcaacgccgctcagaacctgcagaagcggttctggacaagaacccacggcttctacaaggtgtactgcaaggcctaccaggtggacggccagaccgtgtacatccctgagagcaaggaccagaagcagaagatcatcgaagagttcggcgagggctacttcattctgaaggacggggtgtacgaatgggtcaacgccggcaagctgaaaatcaagaagggcagctccaagcagagcagcagcgagctggtggatagcgacatcctgaaagacagcttcgacctggcctccgagctgaaaggcgaaaagctgatgctgtacagggaccccagcggcaatgtgttccccagcgacaaatggatggccgctggcgtgttcttcggaaagctggaacgcatcctgatcagcaagctgaccaaccagtactccatcagcaccatcgaggacgacagcagcaagcagtctatgaaaaggccggcggccacgaaaaaggccggccaggcaaaaaagaaaaagggatcctacccatacgatgttccagattacgcttatccctacgacgtgcctgattatgcatacccatatgatgtccccgactatgcctaa

SEQ ID NO: 7 - protein, 1361 aa, synthetic construct
  REGION 1..1361: note = BhCas12b GGSGGS-ABE8-Xten20at D306 polypeptide sequence
MAPKKKRKVGIHGVPAAATRSFILKIEPNEEVKKGLWKTHEVLNHGIAYYMNILKLIRQEAIYEHHEQDPKNPKKVSKAEIQAELWDFVLKMQKCNSFTHEVDKDEVFNILRELYEELVPSSVEKKGEANQLSNKFLYPLVDPNSQSGKGTASSGRKPRWYNLKIAGDPSWEEEKKKWEEDKKKDPLAKILGKLAEYGLIPLFIPYTDSNEPIVKEIKWMEKSRNQSVRRLDKDMFIQALERFLSWESWNLKVKEEYEKVEKEYKTLEERIKEDIQALKALEQYEKERQEQLLRDTLNTNEYRLSKRGLRGWREIIQKWLKMDGGSGGSSEVEFSHEYWMRHALTLAKRARDEREVPVGAVLVLNNRVIGEGWNRAIGLHDPTAHAEIMALRQGGLVMQNYRLYDATLYVTFEPCVMCAGAMIHSRIGRVVFGVRNAKTGAAGSLMDVLHHPGMNHRVEITEGILADECAALLCRFFRMPRRVFNAQKKAQSSTDGSSGSETPGTSESATPESSGENEPSEKYLEVFKDYQRKHPREAGDYSVYEFLSKKENHFIWRNHPEYPYLYATFCEIDKKKKDAKQQATFTLADPINHPLWVRFEERSGSNLNKYRILTEQLHTEKLKKKLTVQLDRLIYPTESGGWEEKGKVDIVLLPSRQFYNQIFLDIEEKGKHAFTYKDESIKFPLKGTLGGARVQFDRDHLRRYPHKVESGNVGRIYFNMTVNIEPTESPVSKSLKIHRDDFPKVVNFKPKELTEWIKDSKGKKLKSGIESLEIGLRVMSIDLGQRQAAAASIFEVVDQKPDIEGKLFFPIKGTELYAVHRASFNIKLPGETLVKSREVLRKAREDNLKLMNQKLNFLRNVLHFQQFEDITEREKRVTKWISRQENSDVPLVYQDELIQIRELMYKPYKDWVAFLKQLHKRLEVEIGKEVKHWRKSLSDGRKGLYGISLKNIDEIDRTRKFLLRWSLRPTEPGEVRRLEPGQRFAIDQLNHLNALKEDRLKKMANTIIMHALGYCYDVRKKKWQAKNPACQIILFEDLSNYNPYEERSRFENSKLMKWSRREIPRQVALQGEIYGLQVGEVGAQFSSRFHAKTGSPGIRCSVVTKEKLQDNRFFKNLQREGRLTLDKIAVLKEGDLYPDKGGEKFISLSKDRKCVTTHADINAAQNLQKRFWTRTHGFYKVYCKAYQVDGQTVYIPESKDQKQKIIEEFGEGYFILKDGVYEWVNAGKLKIKKGSSKQSSSELVDSDILKDSFDLASELKGEKLMLYRDPSGNVFPSDKWMAAGVFFGKLERILISKLTNQYSISTIEDDSSKQSMKRPAATKKAGQAKKKKGSYPYDVPDYAYPYDVPDYAYPYDVPDYA

SEQ ID NO: 8 - DNA, 4092 bp, synthetic construct
  misc_feature 1..4092: note = BhCas12b GGSGGS-ABE8-Xten20at D980 polynucleotide sequence
  misc_feature 1..6: note = Kozak sequence
  misc_feature 7..57: note = Sequence encoding N-terminal nuclear localization signal (NLS)
  misc_feature 58..2997: note = Sequence encoding BhCas12b
  misc_feature 2998..3015: note = Sequence encoding a linker
  misc_feature 3016..3513: note = Sequence encoding TadA*8
  misc_feature 3514..3573: note = Sequence encoding Xten20 linker
  misc_feature 3574..3954: note = Sequence encoding BhCas12b
  misc_feature 3955..4002: note = Sequence encoding C-terminal NLS
  misc_feature 4003..4008: note = Sequence encoding a GS linker
  misc_feature 4009..4089: note = Sequence encoding 3x hemagglutinin (HA) tag
  source 1..4092: mol_type = other DNA
gccaccatggccccaaagaagaagcggaaggtcggtatccacggagtcccagcagccgccaccagatccttcatcctgaagatcgagcccaacgaggaagtgaagaaaggcctctggaaaacccacgaggtgctgaaccacggaatcgcctactacatgaatatcctgaagctgatccggcaagaggccatctacgagcaccacgagcaggaccccaagaatcccaagaaggtgtccaaggccgagatccaggccgagctgtgggatttcgtgctgaagatgcagaagtgcaacagcttcacacacgaggtggacaaggacgaggtgttcaacatcctgagagagctgtacgaggaactggtgcccagcagcgtggaaaagaagggcgaagccaaccagctgagcaacaagtttctgtaccctctggtggaccccaacagccagtctggaaagggaacagccagcagcggcagaaagcccagatggtacaacctgaagattgccggcgatccctcctgggaagaagagaagaagaagtgggaagaagataagaaaaaggacccgctggccaagatcctgggcaagctggctgagtacggactgatccctctgttcatcccctacaccgacagcaacgagcccatcgtgaaagaaatcaagtggatggaaaagtcccggaaccagagcgtgcggcggctggataaggacatgttcattcaggccctggaacggttcctgagctgggagagctggaacctgaaagtgaaagaggaatacgagaaggtcgagaaagagtacaagaccctggaagagaggatcaaagaggacatccaggctctgaaggctctggaacagtatgagaaagagcggcaagaacagctgctgcgggacaccctgaacaccaacgagtaccggctgagcaagagaggccttagaggctggcgggaaatcatccagaaatggctgaaaatggacgagaacgagccctccgagaagtacctggaagtgttcaaggactaccagcggaagcaccctagagaggccggcgattacagcgtgtacgagttcctgtccaagaaagagaaccacttcatctggcggaatcaccctgagtacccctacctgtacgccaccttctgcgagatcgacaagaaaaagaaggacgccaagcagcaggccaccttcacactggccgatcctatcaatcaccctctgtgggtccgattcgaggaaagaagcggcagcaacctgaacaagtacagaatcctgaccgagcagctgcacaccgagaagctgaagaaaaagctgacagtgcagctggaccggctgatctaccctacagaatctggcggctgggaagagaagggcaaagtggacattgtgctgctgcccagccggcagttctacaaccagatcttcctggacatcgaggaaaagggcaagcacgccttcacctacaaggatgagagcatcaagttccctctgaagggcacactcggcggagccagagtgcagttcgacagagatcacctgagaagataccctcacaaggtggaaagcggcaacgtgggcagaatctacttcaacatgaccgtgaacatcgagcctacagagtccccagtgtccaagtctctgaagatccaccgggacgacttccccaaggtggtcaacttcaagcccaaagaactgaccgagtggatcaaggacagcaagggcaagaaactgaagtccggcatcgagtccctggaaatcggcctgagagtgatgagcatcgacctgggacagagacaggccgctgccgcctctattttcgaggtggtggatcagaagcccgacatcgaaggcaagctgtttttcccaatcaagggcaccgagctgtatgccgtgcacagagccagcttcaacatcaagctgcccggcgagacactggtcaagagcagagaagtgctgcggaaggccagagaggacaatctgaaactgatgaaccagaagctcaacttcctgcggaacgtgctgcacttccagcagttcgaggacatcaccgagagagagaagcgggtcaccaagtggatcagcagacaagagaacagcgacgtgcccctggtgtaccaggatgagctgatccagatccgcgagctgatgtacaagccttacaaggactgggtcgccttcctgaagcagctccacaagagactggaagtcgagatcggcaaagaagtgaagcactggcggaagtccctgagcgacggaagaaagggcctgtacggcatctccctgaagaacatcgacgagatcgatcggacccggaagttcctgctgagatggtccctgaggcctaccgaacctggcgaagtgcgtagactggaacccggccagagattcgccatcgaccagctgaatcacctgaacgccctgaaagaagatcggctgaagaagatggccaacaccatcatcatgcacgccctgggctactgctacgacgtgcggaagaagaaatggcaggctaagaaccccgcctgccagatcatcctgttcgaggatctgagcaactacaacccctacgaggaaaggtcccgcttcgagaacagcaagctcatgaagtggtccagacgcgagatccccagacaggttgcactgcagggcgagatctatggcctgcaagtgggagaagtgggcgctcagttcagcagcagattccacgccaagacaggcagccctggcatcagatgtagcgtcgtgaccaaagagaagctgcaggacaatcggttcttcaagaatctgcagagagagggcagactgaccctggacaaaatcgccgtgctgaaagagggcgatctgtacccagacaaaggcggcgagaagttcatcagcctgagcaaggatcggaagtgcgtgaccacacacgccgacatcaacgccgctcagaacctgcagaagcggttctggacaagaacccacggcttctacaaggtgtactgcaaggcctaccaggtggacggaggctctggaggaagctccgaagtcgagttttcccatgagtactggatgagacacgcattgactctcgcaaagagggctcgagatgaacgcgaggtgcccgtgggggcagtactcgtgctcaacaatcgcgtaatcggcgaaggttggaatagggcaatcggactccacgaccccactgcacatgcggaaatcatggcccttcgacagggagggcttgtgatgcagaattatcgactttatgatgcgacgctgtacgtcacgtttgaaccttgcgtaatgtgcgcgggagctatgattcactcccgcattggacgagttgtattcggtgttcgcaacgccaagacgggtgccgcaggttcactgatggacgtgctgcatcatccaggcatgaaccaccgggtagaaatcacagaaggcatattggcggacgaatgtgcggcgctgttgtgtcgtttttttcgcatgcccaggcgggtctttaacgcccagaaaaaagcacaatcctctactgacggctcttctggatctgaaacacctggcacaagcgagagcgccacccctgagagctctggcggccagaccgtgtacatccctgagagcaaggaccagaagcagaagatcatcgaagagttcggcgagggctacttcattctgaaggacggggtgtacgaatgggtcaacgccggcaagctgaaaatcaagaagggcagctccaagcagagcagcagcgagctggtggatagcgacatcctgaaagacagcttcgacctggcctccgagctgaaaggcgaaaagctgatgctgtacagggaccccagcggcaatgtgttccccagcgacaaatggatggccgctggcgtgttcttcggaaagctggaacgcatcctgatcagcaagctgaccaaccagtactccatcagcaccatcgaggacgacagcagcaagcagtctatgaaaaggccggcggccacgaaaaaggccggccaggcaaaaaagaaaaagggatcctacccatacgatgttccagattacgcttatccctacgacgtgcctgattatgcatacccatatgatgtccccgactatgcctaa

SEQ ID NO: 9 - protein, 1361 aa, synthetic construct
  REGION 1..1361: note = BhCas12b GGSGGS-ABE8-Xten20at D980 polypeptide sequence
MAPKKKRKVGIHGVPAAATRSFILKIEPNEEVKKGLWKTHEVLNHGIAYYMNILKLIRQEAIYEHHEQDPKNPKKVSKAEIQAELWDFVLKMQKCNSFTHEVDKDEVFNILRELYEELVPSSVEKKGEANQLSNKFLYPLVDPNSQSGKGTASSGRKPRWYNLKIAGDPSWEEEKKKWEEDKKKDPLAKILGKLAEYGLIPLFIPYTDSNEPIVKEIKWMEKSRNQSVRRLDKDMFIQALERFLSWESWNLKVKEEYEKVEKEYKTLEERIKEDIQALKALEQYEKERQEQLLRDTLNTNEYRLSKRGLRGWREIIQKWLKMDENEPSEKYLEVFKDYQRKHPREAGDYSVYEFLSKKENHFIWRNHPEYPYLYATFCEIDKKKKDAKQQATFTLADPINHPLWVRFEERSGSNLNKYRILTEQLHTEKLKKKLTVQLDRLIYPTESGGWEEKGKVDIVLLPSRQFYNQIFLDIEEKGKHAFTYKDESIKFPLKGTLGGARVQFDRDHLRRYPHKVESGNVGRIYFNMTVNIEPTESPVSKSLKIHRDDFPKVVNFKPKELTEWIKDSKGKKLKSGIESLEIGLRVMSIDLGQRQAAAASIFEVVDQKPDIEGKLFFPIKGTELYAVHRASFNIKLPGETLVKSREVLRKAREDNLKLMNQKLNFLRNVLHFQQFEDITEREKRVTKWISRQENSDVPLVYQDELIQIRELMYKPYKDWVAFLKQLHKRLEVEIGKEVKHWRKSLSDGRKGLYGISLKNIDEIDRTRKFLLRWSLRPTEPGEVRRLEPGQRFAIDQLNHLNALKEDRLKKMANTIIMHALGYCYDVRKKKWQAKNPACQIILFEDLSNYNPYEERSRFENSKLMKWSRREIPRQVALQGEIYGLQVGEVGAQFSSRFHAKTGSPGIRCSVVTKEKLQDNRFFKNLQREGRLTLDKIAVLKEGDLYPDKGGEKFISLSKDRKCVTTHADINAAQNLQKRFWTRTHGFYKVYCKAYQVDGGSGGSSEVEFSHEYWMRHALTLAKRARDEREVPVGAVLVLNNRVIGEGWNRAIGLHDPTAHAEIMALRQGGLVMQNYRLYDATLYVTFEPCVMCAGAMIHSRIGRVVFGVRNAKTGAAGSLMDVLHHPGMNHRVEITEGILADECAALLCRFFRMPRRVFNAQKKAQSSTDGSSGSETPGTSESATPESSGGQTVYIPESKDQKQKIIEEFGEGYFILKDGVYEWVNAGKLKIKKGSSKQSSSELVDSDILKDSFDLASELKGEKLMLYRDPSGNVFPSDKWMAAGVFFGKLERILISKLTNQYSISTIEDDSSKQSMKRPAATKKAGQAKKKKGSYPYDVPDYAYPYDVPDYAYPYDVPDYA

SEQ ID NO: 10 - DNA, 4092 bp, synthetic construct
  misc_feature 1..4092: note = BhCas12b GGSGGS-ABE8-Xten20at K1019 polynucleotide sequence
  misc_feature 1..6: note = Kozak sequence
  misc_feature 7..57: note = Sequence encoding N-terminal nuclear localization signal (NLS)
  misc_feature 58..3114: note = Sequence encoding BhCas12b
  misc_feature 3115..3132: note = Sequence encoding a linker
  misc_feature 3133..3630: note = Sequence encoding TadA*8
  misc_feature 3631..3690: note = Sequence encoding Xten20 linker
  misc_feature 3691..3954: note = Sequence encoding BhCas12b
  misc_feature 3955..4002: note = Sequence encoding C-terminal NLS
  misc_feature 4003..4008: note = Sequence encoding GS linker
  misc_feature 4009..4089: note = Sequence encoding 3x hemagglutinin (HA) tag
  source 1..4092: mol_type = other DNA
gccaccatggccccaaagaagaagcggaaggtcggtatccacggagtcccagcagccgccaccagatccttcatcctgaagatcgagcccaacgaggaagtgaagaaaggcctctggaaaacccacgaggtgctgaaccacggaatcgcctactacatgaatatcctgaagctgatccggcaagaggccatctacgagcaccacgagcaggaccccaagaatcccaagaaggtgtccaaggccgagatccaggccgagctgtgggatttcgtgctgaagatgcagaagtgcaacagcttcacacacgaggtggacaaggacgaggtgttcaacatcctgagagagctgtacgaggaactggtgcccagcagcgtggaaaagaagggcgaagccaaccagctgagcaacaagtttctgtaccctctggtggaccccaacagccagtctggaaagggaacagccagcagcggcagaaagcccagatggtacaacctgaagattgccggcgatccctcctgggaagaagagaagaagaagtgggaagaagataagaaaaaggacccgctggccaagatcctgggcaagctggctgagtacggactgatccctctgttcatcccctacaccgacagcaacgagcccatcgtgaaagaaatcaagtggatggaaaagtcccggaaccagagcgtgcggcggctggataaggacatgttcattcaggccctggaacggttcctgagctgggagagctggaacctgaaagtgaaagaggaatacgagaaggtcgagaaagagtacaagaccctggaagagaggatcaaagaggacatccaggctctgaaggctctggaacagtatgagaaagagcggcaagaacagctgctgcgggacaccctgaacaccaacgagtaccggctgagcaagagaggccttagaggctggcgggaaatcatccagaaatggctgaaaatggacgagaacgagccctccgagaagtacctggaagtgttcaaggactaccagcggaagcaccctagagaggccggcgattacagcgtgtacgagttcctgtccaagaaagagaaccacttcatctggcggaatcaccctgagtacccctacctgtacgccaccttctgcgagatcgacaagaaaaagaaggacgccaagcagcaggccaccttcacactggccgatcctatcaatcaccctctgtgggtccgattcgaggaaagaagcggcagcaacctgaacaagtacagaatcctgaccgagcagctgcacaccgagaagctgaagaaaaagctgacagtgcagctggaccggctgatctaccctacagaatctggcggctgggaagagaagggcaaagtggacattgtgctgctgcccagccggcagttctacaaccagatcttcctggacatcgaggaaaagggcaagcacgccttcacctacaaggatgagagcatcaagttccctctgaagggcacactcggcggagccagagtgcagttcgacagagatcacctgagaagataccctcacaaggtggaaagcggcaacgtgggcagaatctacttcaacatgaccgtgaacatcgagcctacagagtccccagtgtccaagtctctgaagatccaccgggacgacttccccaaggtggtcaacttcaagcccaaagaactgaccgagtggatcaaggacagcaagggcaagaaactgaagtccggcatcgagtccctggaaatcggcctgagagtgatgagcatcgacctgggacagagacaggccgctgccgcctctattttcgaggtggtggatcagaagcccgacatcgaaggcaagctgtttttcccaatcaagggcaccgagctgtatgccgtgcacagagccagcttcaacatcaagctgcccggcgagacactggtcaagagcagagaagtgctgcggaaggccagagaggacaatctgaaactgatgaaccagaagctcaacttcctgcggaacgtgctgcacttccagcagttcgaggacatcaccgagagagagaagcgggtcaccaagtggatcagcagacaagagaacagcgacgtgcccctggtgtaccaggatgagctgatccagatccgcgagctgatgtacaagccttacaaggactgggtcgccttcctgaagcagctccacaagagactggaagtcgagatcggcaaagaagtgaagcactggcggaagtccctgagcgacggaagaaagggcctgtacggcatctccctgaagaacatcgacgagatcgatcggacccggaagttcctgctgagatggtccctgaggcctaccgaacctggcgaagtgcgtagactggaacccggccagagattcgccatcgaccagctgaatcacctgaacgccctgaaagaagatcggctgaagaagatggccaacaccatcatcatgcacgccctgggctactgctacgacgtgcggaagaagaaatggcaggctaagaaccccgcctgccagatcatcctgttcgaggatctgagcaactacaacccctacgaggaaaggtcccgcttcgagaacagcaagctcatgaagtggtccagacgcgagatccccagacaggttgcactgcagggcgagatctatggcctgcaagtgggagaagtgggcgctcagttcagcagcagattccacgccaagacaggcagccctggcatcagatgtagcgtcgtgaccaaagagaagctgcaggacaatcggttcttcaagaatctgcagagagagggcagactgaccctggacaaaatcgccgtgctgaaagagggcgatctgtacccagacaaaggcggcgagaagttcatcagcctgagcaaggatcggaagtgcgtgaccacacacgccgacatcaacgccgctcagaacctgcagaagcggttctggacaagaacccacggcttctacaaggtgtactgcaaggcctaccaggtggacggccagaccgtgtacatccctgagagcaaggaccagaagcagaagatcatcgaagagttcggcgagggctacttcattctgaaggacggggtgtacgaatgggtcaacgccggcaagggaggctctggaggaagctccgaagtcgagttttcccatgagtactggatgagacacgcattgactctcgcaaagagggctcgagatgaacgcgaggtgcccgtgggggcagtactcgtgctcaacaatcgcgtaatcggcgaaggttggaatagggcaatcggactccacgaccccactgcacatgcggaaatcatggcccttcgacagggagggcttgtgatgcagaattatcgactttatgatgcgacgctgtacgtcacgtttgaaccttgcgtaatgtgcgcgggagctatgattcactcccgcattggacgagttgtattcggtgttcgcaacgccaagacgggtgccgcaggttcactgatggacgtgctgcatcatccaggcatgaaccaccgggtagaaatcacagaaggcatattggcggacgaatgtgcggcgctgttgtgtcgtttttttcgcatgcccaggcgggtctttaacgcccagaaaaaagcacaatcctctactgacggctcttctggatctgaaacacctggcacaagcgagagcgccacccctgagagctctggcctgaaaatcaagaagggcagctccaagcagagcagcagcgagctggtggatagcgacatcctgaaagacagcttcgacctggcctccgagctgaaaggcgaaaagctgatgctgtacagggaccccagcggcaatgtgttccccagcgacaaatggatggccgctggcgtgttcttcggaaagctggaacgcatcctgatcagcaagctgaccaaccagtactccatcagcaccatcgaggacgacagcagcaagcagtctatgaaaaggccggcggccacgaaaaaggccggccaggcaaaaaagaaaaagggatcctacccatacgatgttccagattacgcttatccctacgacgtgcctgattatgcatacccatatgatgtccccgactatgcctaa

SEQ ID NO: 11 - protein, 1361 aa, synthetic construct
  REGION 1..1361: note = BhCas12b GGSGGS-ABE8-Xten20at K1019 polypeptide sequence
MAPKKKRKVGIHGVPAAATRSFILKIEPNEEVKKGLWKTHEVLNHGIAYYMNILKLIRQEAIYEHHEQDPKNPKKVSKAEIQAELWDFVLKMQKCNSFTHEVDKDEVFNILRELYEELVPSSVEKKGEANQLSNKFLYPLVDPNSQSGKGTASSGRKPRWYNLKIAGDPSWEEEKKKWEEDKKKDPLAKILGKLAEYGLIPLFIPYTDSNEPIVKEIKWMEKSRNQSVRRLDKDMFIQALERFLSWESWNLKVKEEYEKVEKEYKTLEERIKEDIQALKALEQYEKERQEQLLRDTLNTNEYRLSKRGLRGWREIIQKWLKMDENEPSEKYLEVFKDYQRKHPREAGDYSVYEFLSKKENHFIWRNHPEYPYLYATFCEIDKKKKDAKQQATFTLADPINHPLWVRFEERSGSNLNKYRILTEQLHTEKLKKKLTVQLDRLIYPTESGGWEEKGKVDIVLLPSRQFYNQIFLDIEEKGKHAFTYKDESIKFPLKGTLGGARVQFDRDHLRRYPHKVESGNVGRIYFNMTVNIEPTESPVSKSLKIHRDDFPKVVNFKPKELTEWIKDSKGKKLKSGIESLEIGLRVMSIDLGQRQAAAASIFEVVDQKPDIEGKLFFPIKGTELYAVHRASFNIKLPGETLVKSREVLRKAREDNLKLMNQKLNFLRNVLHFQQFEDITEREKRVTKWISRQENSDVPLVYQDELIQIRELMYKPYKDWVAFLKQLHKRLEVEIGKEVKHWRKSLSDGRKGLYGISLKNIDEIDRTRKFLLRWSLRPTEPGEVRRLEPGQRFAIDQLNHLNALKEDRLKKMANTIIMHALGYCYDVRKKKWQAKNPACQIILFEDLSNYNPYEERSRFENSKLMKWSRREIPRQVALQGEIYGLQVGEVGAQFSSRFHAKTGSPGIRCSVVTKEKLQDNRFFKNLQREGRLTLDKIAVLKEGDLYPDKGGEKFISLSKDRKCVTTHADINAAQNLQKRFWTRTHGFYKVYCKAYQVDGQTVYIPESKDQKQKIIEEFGEGYFILKDGVYEWVNAGKGGSGGSSEVEFSHEYWMRHALTLAKRARDEREVPVGAVLVLNNRVIGEGWNRAIGLHDPTAHAEIMALRQGGLVMQNYRLYDATLYVTFEPCVMCAGAMIHSRIGRVVFGVRNAKTGAAGSLMDVLHHPGMNHRVEITEGILADECAALLCRFFRMPRRVFNAQKKAQSSTDGSSGSETPGTSESATPESSGLKIKKGSSKQSSSELVDSDILKDSFDLASELKGEKLMLYRDPSGNVFPSDKWMAAGVFFGKLERILISKLTNQYSISTIEDDSSKQSMKRPAATKKAGQAKKKKGSYPYDVPDYAYPYDVPDYAYPYDVPDYA

SEQ ID NO: 12 - protein, 208 aa, Petromyzon marinus
  REGION 1..208: note = MISC_FEATURE - tr|A5H718|A5H718_PETMA Cytosine deaminase OS=Petromyzon marinusOX=7757 PE=2 SV=1 amino acid sequence; PmCDA1 polypeptide sequence
MTDAEYVRIHEKLDIYTFKKQFFNNKKSVSHRCYVLFELKRRGERRACFWGYAVNKPQSGTERGIHAEIFSIRKVEEYLRDNPGQFTINWYSSWSPCADCAEKILEWYNQELRGNGHTLKIWACKLYYEKNARNQIGLWNLRDNGVGLNVMVSEHYQCCRKIFIQSSHNQLNENRWLEKTLKRAEKRRSELSIMIQVKILHTTKSPAV

SEQ ID NO: 13 - DNA, 766 bp, Petromyzon marinus
  misc_feature 1..766: note = EF094822.1 Petromyzon marinus isolate PmCDA.21 cytosine deaminase mRNA, complete cds; PmCDA1 polynucleotide sequence
  source 1..766: mol_type = genomic DNA
tgacacgacacagccgtgtatatgaggaagggtagctggatggggggggggggaatacgttcagagaggacattagcgagcgtcttgttggtggccttgagtctagacacctgcagacatgaccgacgctgagtacgtgagaatccatgagaagttggacatctacacgtttaagaaacagtttttcaacaacaaaaaatccgtgtcgcatagatgctacgttctctttgaattaaaacgacggggtgaacgtagagcgtgtttttggggctatgctgtgaataaaccacagagcgggacagaacgtggaattcacgccgaaatctttagcattagaaaagtcgaagaatacctgcgcgacaaccccggacaattcacgataaattggtactcatcctggagtccttgtgcagattgcgctgaaaagatcttagaatggtataaccaggagctgcgggggaacggccacactttgaaaatctgggcttgcaaactctattacgagaaaaatgcgaggaatcaaattgggctgtggaacctcagagataacggggttgggttgaatgtaatggtaagtgaacactaccaatgttgcaggaaaatattcatccaatcgtcgcacaatcaattgaatgagaatagatggcttgagaagactttgaagcgagctgaaaaacgacggagcgagttgtccattatgattcaggtaaaaatactccacaccactaagagtcctgctgtttaagaggctatgcggatggttttc

SEQ ID NO: 14 - protein, 145 aa, Homo sapiens
  REGION 1..145: note = MISC_FEATURE - tr|Q6QJ80|Q6QJ80_HUMAN Activation-induced cytidine deaminase OS=Homo sapiens; OX = 9606 GN=AICDA PE=2 SV=1; AID polypeptide sequence
MDSLLMNRRKFLYQFKNVRWAKGRRETYLCYVVKRRDSATSFSLDFGYLRNKNGCHVELLFLRYISDWDLDPGRCYRVTWFTSWSPCYDCARHVADFLRGNPNLSLRIFTARLYFCEDRKAEPEGLRRLHRAGVQIAIMTFKAPV

SEQ ID NO: 15 - DNA, 10681 bp, Homo sapiens
  misc_feature 1..10681: note = NG_011588.1:5001-15681 Homo sapiens activation induced cytidine deaminase (AICDA), RefSeqGene (LRG_17) on chromosome 12; nucleic acid sequence of the CDS of human AID; polynucleotide sequence
  source 1..10681: mol_type = genomic DNA
agagaaccatcattaattgaagtgagatttttctggcctgagacttgcagggaggcaagaagacactctggacaccactatggacaggtaaagaggcagtcttctcgtgggtgattgcactggccttcctctcagagcaaatctgagtaatgagactggtagctatccctttctctcatgtaactgtctgactgataagatcagcttgatcaatatgcatatatattttttgatctgtctccttttcttctattcagatcttatacgctgtcagcccaattctttctgtttcagacttctcttgatttccctctttttcatgtggcaaaagaagtagtgcgtacaatgtactgattcgtcctgagatttgtaccatggttgaaactaatttatggtaataatattaacatagcaaatctttagagactcaaatcatgaaaaggtaatagcagtactgtactaaaaacggtagtgctaattttcgtaataattttgtaaatattcaacagtaaaacaacttgaagacacactttcctagggaggcgttactgaaataatttagctatagtaagaaaatttgtaattttagaaatgccaagcattctaaattaattgcttgaaagtcactatgattgtgtccattataaggagacaaattcattcaagcaagttatttaatgttaaaggcccaattgttaggcagttaatggcacttttactattaactaatctttccatttgttcagacgtagcttaacttacctcttaggtgtgaatttggttaaggtcctcataatgtctttatgtgcagtttttgataggttattgtcatagaacttattctattcctacatttatgattactatggatgtatgagaataacacctaatccttatactttacctcaatttaactcctttataaagaacttacattacagaataaagattttttaaaaatatatttttttgtagagacagggtcttagcccagccgaggctggtctctaagtcctggcccaagcgatcctcctgcctgggcctcctaaagtgctggaattatagacatgagccatcacatccaatatacagaataaagatttttaatggaggatttaatgttcttcagaaaattttcttgaggtcagacaatgtcaaatgtctcctcagtttacactgagattttgaaaacaagtctgagctataggtccttgtgaagggtccattggaaatacttgttcaaagtaaaatggaaagcaaaggtaaaatcagcagttgaaattcagagaaagacagaaaaggagaaaagatgaaattcaacaggacagaagggaaatatattatcattaaggaggacagtatctgtagagctcattagtgatggcaaaatgacttggtcaggattatttttaacccgcttgtttctggtttgcacggctggggatgcagctagggttctgcctcagggagcacagctgtccagagcagctgtcagcctgcaagcctgaaacactccctcggtaaagtccttcctactcaggacagaaatgacgagaacagggagctggaaacaggcccctaaccagagaagggaagtaatggatcaacaaagttaactagcaggtcaggatcacgcaattcatttcactctgactggtaacatgtgacagaaacagtgtaggcttattgtattttcatgtagagtaggacccaaaaatccacccaaagtcctttatctatgccacatccttcttatctatacttccaggacactttttcttccttatgataaggctctctctctctccacacacacacacacacacacacacacacacacacacacacacacaaacacacaccccgccaaccaaggtgcatgtaaaaagatgtagattcctctgcctttctcatctacacagcccaggagggtaagttaatataagagggatttattggtaagagatgatgcttaatctgtttaacactgggcctcaaagagagaatttcttttcttctgtacttattaagcacctattatgtgttgagcttatatatacaaagggttattatatgctaatatagtaatagtaatggtggttggtactatggtaattaccataaaaattattatccttttaaaataaagctaattattattggatcttttttagtattcattttatgttttttatgtttttgattttttaaaagacaatctcaccctgttacccaggctggagtgcagtggtgcaatcatagctttctgcagtcttgaactcctgggctcaagcaatcctcctgccttggcctcccaaagtgttgggatacagtcatgagccactgcatctggcctaggatccatttagattaaaatatgcattttaaattttaaaataatatggctaatttttaccttatgtaatgtgtatactggcaataaatctagtttgctgcctaaagtttaaagtgctttccagtaagcttcatgtacgtgaggggagacatttaaagtgaaacagacagccaggtgtggtggctcacgcctgtaatcccagcactctgggaggctgaggtgggtggatcgcttgagccctggagttcaagaccagcctgagcaacatggcaaaacgctgtttctataacaaaaattagccgggcatggtggcatgtgcctgtggtcccagctactagggggctgaggcaggagaatcgttggagcccaggaggtcaaggctgcactgagcagtgcttgcgccactgcactccagcctgggtgacaggaccagaccttgcctcaaaaaaataagaagaaaaattaaaaataaatggaaacaactacaaagagctgttgtcctagatgagctacttagttaggctgatattttggtatttaacttttaaagtcagggtctgtcacctgcactacattattaaaatatcaattctcaatgtatatccacacaaagactggtacgtgaatgttcatagtacctttattcacaaaaccccaaagtagagactatccaaatatccatcaacaagtgaacaaataaacaaaatgtgctatatccatgcaatggaataccaccctgcagtacaaagaagctacttggggatgaatcccaaagtcatgacgctaaatgaaagagtcagacatgaaggaggagataatgtatgccatacgaaattctagaaaatgaaagtaacttatagttacagaaagcaaatcagggcaggcatagaggctcacacctgtaatcccagcactttgagaggccacgtgggaagattgctagaactcaggagttcaagaccagcctgggcaacacagtgaaactccattctccacaaaaatgggaaaaaaagaaagcaaatcagtggttgtcctgtggggaggggaaggactgcaaagagggaagaagctctggtggggtgagggtggtgattcaggttctgtatcctgactgtggtagcagtttggggtgtttacatccaaaaatattcgtagaattatgcatcttaaatgggtggagtttactgtatgtaaattatacctcaatgtaagaaaaaataatgtgtaagaaaactttcaattctcttgccagcaaacgttattcaaattcctgagccctttacttcgcaaattctctgcacttctgccccgtaccattaggtgacagcactagctccacaaattggataaatgcatttctggaaaagactagggacaaaatccaggcatcacttgtgctttcatatcaaccatgctgtacagcttgtgttgctgtctgcagctgcaatggggactcttgatttctttaaggaaacttgggttaccagagtatttccacaaatgctattcaaattagtgcttatgatatgcaagacactgtgctaggagccagaaaacaaagaggaggagaaatcagtcattatgtgggaacaacatagcaagatatttagatcattttgactagttaaaaaagcagcagagtacaaaatcacacatgcaatcagtataatccaaatcatgtaaatatgtgcctgtagaaagactagaggaataaacacaagaatcttaacagtcattgtcattagacactaagtctaattattattattagacactatgatatttgagatttaaaaaatctttaatattttaaaatttagagctcttctatttttccatagtattcaagtttgacaatgatcaagtattactctttctttttttttttttttttttttttttgagatggagttttggtcttgttgcccatgctggagtggaatggcatgaccatagctcactgcaacctccacctcctgggttcaagcaaagctgtcgcctcagcctcccgggtagatgggattacaggcgcccaccaccacactcggctaatgtttgtatttttagtagagatggggtttcaccatgttggccaggctggtctcaaactcctgacctcagaggatccacctgcctcagcctcccaaagtgctgggattacagatgtaggccactgcgcccggccaagtattgctcttatacattaaaaaacaggtgtgagccactgcgcccagccaggtattgctcttatacattaaaaaataggccggtgcagtggctcacgcctgtaatcccagcactttgggaagccaaggcgggcagaacacccgaggtcaggagtccaaggccagcctggccaagatggtgaaaccccgtctctattaaaaatacaaacattacctgggcatgatggtgggcgcctgtaatcccagctactcaggaggctgaggcaggaggatccgcggagcctggcagatctgcctgagcctgggaggttgaggctacagtaagccaagatcatgccagtatacttcagcctgggcgacaaagtgagaccgtaacaaaaaaaaaaaaatttaaaaaaagaaatttagatcaagatccaactgtaaaaagtggcctaaacaccacattaaagagtttggagtttattctgcaggcagaagagaaccatcagggggtcttcagcatgggaatggcatggtgcacctggtttttgtgagatcatggtggtgacagtgtggggaatgttattttggagggactggaggcagacagaccggttaaaaggccagcacaacagataaggaggaagaagatgagggcttggaccgaagcagagaagagcaaacagggaaggtacaaattcaagaaatattggggggtttgaatcaacacatttagatgattaattaaatatgaggactgaggaataagaaatgagtcaaggatggttccaggctgctaggctgcttacctgaggtggcaaagtcgggaggagtggcagtttaggacagggggcagttgaggaatattgttttgatcattttgagtttgaggtacaagttggacacttaggtaaagactggaggggaaatctgaatatacaattatgggactgaggaacaagtttattttattttttgtttcgttttcttgttgaagaacaaatttaattgtaatcccaagtcatcagcatctagaagacagtggcaggaggtgactgtcttgtgggtaagggtttggggtccttgatgagtatctctcaattggccttaaatataagcaggaaaaggagtttatgatggattccaggctcagcagggctcaggagggctcaggcagccagcagaggaagtcagagcatcttctttggtttagcccaagtaatgacttccttaaaaagctgaaggaaaatccagagtgaccagattataaactgtactcttgcattttctctccctcctctcacccacagcctcttgatgaaccggaggaagtttctttaccaattcaaaaatgtccgctgggctaagggtcggcgtgagacctacctgtgctacgtagtgaagaggcgtgacagtgctacatccttttcactggactttggttatcttcgcaataaggtatcaattaaagtcggctttgcaagcagtttaatggtcaactgtgagtgcttttagagccacctgctgatggtattacttccatccttttttggcatttgtgtctctatcacattcctcaaatccttttttttatttctttttccatgtccatgcacccatattagacatggcccaaaatatgtgatttaattcctccccagtaatgctgggcaccctaataccactccttccttcagtgccaagaacaactgctcccaaactgtttaccagctttcctcagcatctgaattgcctttgagattaattaagctaaaagcatttttatatgggagaatattatcagcttgtccaagcaaaaattttaaatgtgaaaaacaaattgtgtcttaagcatttttgaaaattaaggaagaagaatttgggaaaaaattaacggtggctcaattctgtcttccaaatgatttcttttccctcctactcacatgggtcgtaggccagtgaatacattcaacatggtgatccccagaaaactcagagaagcctcggctgatgattaattaaattgatctttcggctacccgagagaattacatttccaagagacttcttcaccaaaatccagatgggtttacataaacttctgcccacgggtatctcctctctcctaacacgctgtgacgtctgggcttggtggaatctcagggaagcatccgtggggtggaaggtcatcgtctggctcgttgtttgatggttatattaccatgcaattttctttgcctacatttgtattgaatacatcccaatctccttcctattcggtgacatgacacattctatttcagaaggctttgattttatcaagcactttcatttacttctcatggcagtgcctattacttctcttacaatacccatctgtctgctttaccaaaatctatttccccttttcagatcctcccaaatggtcctcataaactgtcctgcctccacctagtggtccaggtatatttccacaatgttacatcaacaggcacttctagccattttccttctcaaaaggtgcaaaaagcaacttcataaacacaaattaaatcttcggtgaggtagtgtgatgctgcttcctcccaactcagcgcacttcgtcttcctcattccacaaaaacccatagccttccttcactctgcaggactagtgctgccaagggttcagctctacctactggtgtgctcttttgagcaagttgcttagcctctctgtaacacaaggacaatagctgcaagcatccccaaagatcattgcaggagacaatgactaaggctaccagagccgcaataaaagtcagtgaattttagcgtggtcctctctgtctctccagaacggctgccacgtggaattgctcttcctccgctacatctcggactgggacctagaccctggccgctgctaccgcgtcacctggttcacctcctggagcccctgctacgactgtgcccgacatgtggccgactttctgcgagggaaccccaacctcagtctgaggatcttcaccgcgcgcctctacttctgtgaggaccgcaaggctgagcccgaggggctgcggcggctgcaccgcgccggggtgcaaatagccatcatgaccttcaaaggtgcgaaagggccttccgcgcaggcgcagtgcagcagcccgcattcgggattgcgatgcggaatgaatgagttagtggggaagctcgaggggaagaagtgggcggggattctggttcacctctggagccgaaattaaagattagaagcagagaaaagagtgaatggctcagagacaaggccccgaggaaatgagaaaatggggccagggttgcttctttcccctcgatttggaacctgaactgtcttctacccccatatccccgcctttttttcctttttttttttttgaagattatttttactgctggaatacttttgtagaaaaccacgaaagaactttcaaagcctgggaagggctgcatgaaaattcagttcgtctctccagacagcttcggcgcatccttttggtaaggggcttcctcgctttttaaattttctttctttctctacagtcttttttggagtttcgtatatttcttatattttcttattgttcaatcactctcagttttcatctgatgaaaactttatttctcctccacatcagctttttcttctgctgtttcaccattcagagccctctgctaaggttccttttccctcccttttctttcttttgttgtttcacatctttaaatttctgtctctccccagggttgcgtttccttcctggtcagaattcttttctcctttttttttttttttttttttttttttaaacaaacaaacaaaaaacccaaaaaaactctttcccaatttactttcttccaacatgttacaaagccatccactcagtttagaagactctccggccccaccgacccccaacctcgttttgaagccattcactcaatttgcttctctctttctctacagcccctgtatgaggttgatgacttacgagacgcatttcgtactttgggactttgatagcaacttccaggaatgtcacacacgatgaaatatctctgctgaagacagtggataaaaaacagtccttcaagtcttctctgtttttattcttcaactctcactttcttagagtttacagaaaaaatatttatatacgactctttaaaaagatctatgtcttgaaaatagagaaggaacacaggtctggccagggacgtgctgcaattggtgcagttttgaatgcaacattgtcccctactgggaataacagaactgcaggacctgggagcatcctaaagtgtcaacgtttttctatgacttttaggtaggatgagagcagaaggtagatcctaaaaagcatggtgagaggatcaaatgtttttatatcaacatcctttattatttgattcatttgagttaacagtggtgttagtgatagatttttctattcttttcccttgacgtttactttcaagtaacacaaactcttccatcaggccatgatctataggacctcctaatgagagtatctgggtgattgtgaccccaaaccatctctccaaagcattaatatccaatcatgcgctgtatgttttaatcagcagaagcatgtttttatgtttgtacaaaagaagattgttatgggtggggatggaggtatagaccatgcatggtcaccttcaagctactttaataaaggatcttaaaatgggcaggaggactgtgaacaagacaccctaataatgggttgatgtctgaagtagcaaatcttctggaaacgcaaactcttttaaggaagtccctaatttagaaacacccacaaacttcacatatcataattagcaaacaattggaaggaagttgcttgaatgttggggagaggaaaatctattggctctcgtgggtctcttcatctcagaaatgccaatcaggtcaaggtttgctacattttgtatgtgtgtgatgcttctcccaaaggtatattaactatataagagagttgtgacaaaacagaatgataaagctgcgaaccgtggcacacgctcatagttctagctgcttgggaggttgaggagggaggatggcttgaacacaggtgttcaaggccagcctgggcaacataacaagatcctgtctctcaaaaaaaaaaaaaaaaaaaagaaagagagagggccgggcgtggtggctcacgcctgtaatcccagcactttgggaggccgagccgggcggatcacctgtggtcaggagtttgagaccagcctggccaacatggcaaaaccccgtctgtactcaaaatgcaaaaattagccaggcgtggtagcaggcacctgtaatcccagctacttgggaggctgaggcaggagaatcgcttgaacccaggaggtggaggttgcagtaagctgagatcgtgccgttgcactccagcctgggcgacaagagcaagactctgtctcagaaaaaaaaaaaaaaaagagagagagagagaaagagaacaatatttgggagagaaggatggggaagcattgcaaggaaattgtgctttatccaacaaaatgtaaggagccaataagggatccctatttgtctcttttggtgtctatttgtccctaacaactgtctttgacagtgagaaaaatattcagaataaccatatccctgtgccgttattacctagcaacccttgcaatgaagatgagcagatccacaggaaaacttgaatgcacaactgtcttattttaatcttattgtacataagtttgtaaaagagttaaaaattgttacttcatgtattcatttatattttatattattttgcgtctaatgattttttattaacatgatttccttttctgatatattgaaatggagtctcaaagcttcataaatttataactttagaaatgattctaataacaacgtatgtaattgtaacattgcagtaatggtgctacgaagccatttctcttgatttttagtaaacttttatgacagcaaatttgcttctggctcactttcaatcagttaaataaatgataaataattttggaagctgtgaagataaaataccaaataaaataatataaaagtgatttatatgaagttaaaataaaaaatcagtatgatggaataaacttg

SEQ ID NO: 16 - protein, 198 aa, Homo sapiens [sequence omitted]

SEQ ID NO: 17 - protein, 198 aa, Canis lupus
  REGION 1..198: note = MISC_FEATURE - Canine AID (clAID) polypeptide sequence
  REGION 1..30: note = MISC_FEATURE - Nuclear localization sequence
  REGION 183..198: note = MISC_FEATURE - Nuclear export signal
MDSLLMKQRKFLYHFKNVRWAKGRHETYLCYVVKRRDSATSFSLDFGHLRNKSGCHVELLFLRYISDWDLDPGRCYRVTWFTSWSPCYDCARHVADFLRGYPNLSLRIFAARLYFCEDRKAEPEGLRRLHRAGVQIAIMTFKDYFYCWNTFVENREKTFKAWEGLHENSVRLSRQLRRILLPLYEVDDLRDAFRTLGL

SEQ ID NO: 18 - protein, 199 aa, Bos taurus
  REGION 1..199: note = MISC_FEATURE - Bovine AID (btAID) polypeptide sequence
  REGION 1..30: note = MISC_FEATURE - Nuclear localization sequence
  REGION 183..199: note = MISC_FEATURE - Nuclear export signal
MDSLLKKQRQFLYQFKNVRWAKGRHETYLCYVVKRRDSPTSFSLDFGHLRNKAGCHVELLFLRYISDWDLDPGRCYRVTWFTSWSPCYDCARHVADFLRGYPNLSLRIFTARLYFCDKERKAEPEGLRRLHRAGVQIAIMTFKDYFYCWNTFVENHERTFKAWEGLHENSVRLSRQLRRILLPLYEVDDLRDAFRTLGL

SEQ ID NO: 19 - protein, 239 aa, Rattus sp.
  REGION 1..239: note = MISC_FEATURE - Rat AID polypeptide sequence
  REGION 1..26: note = MISC_FEATURE - Nuclear localization sequence
  REGION 194..239: note = MISC_FEATURE - Nuclear export signal
MAVGSKPKAALVGPHWERERIWCFLCSTGLGTQQTGQTSRWLRPAATQDPVSPPRSLLMKQRKFLYHFKNVRWAKGRHETYLCYVVKRRDSATSFSLDFGYLRNKSGCHVELLFLRYISDWDLDPGRCYRVTWFTSWSPCYDCARHVADFLRGNPNLSLRIFTARLTGWGALPAGLMSPARPSDYFYCWNTFVENHERTFKAWEGLHENSVRLSRRLRRILLPLYEVDDLRDAFRTLGL

SEQ ID NO: 20 - protein, 198 aa, Mus musculus [sequence omitted]

SEQ ID NO: 21 - protein, 229 aa, Rattus norvegicus [sequence omitted]

SEQ ID NO: 22 - protein, 229 aa, Mesocricetus auratus
  REGION 1..229: note = MISC_FEATURE - maAPOBEC-1 polypeptide sequence
MSSETGPVVVDPTLRRRIEPHEFDAFFDQGELRKETCLLYEIRWGGRHNIWRHTGQNTSRHVEINFIEKFTSERYFYPSTRCSIVWFLSWSPCGECSKAITEFLSGHPNVTLFIYAARLYHHTDQRNRQGLRDLISRGVTIRIMTEQEYCYCWRNFVNYPPSNEVYWPRYPNLWMRLYALELYCIHLGLPPCLKIKRRHQYPLTFFRLNLQSCHYQRIPPHILWATGFI

SEQ ID NO: 23 - protein, 236 aa, Pongo pygmaeus
  REGION 1..236: note = MISC_FEATURE - ppAPOBEC-1 polypeptide sequence
MTSEKGPSTGDPTLRRRIESWEFDVFYDPRELRKETCLLYEIKWGMSRKIWRSSGKNTTNHVEVNFIKKFTSERRFHSSISCSITWFLSWSPCWECSQAIREFLSQHPGVTLVIYVARLFWHMDQRNRQGLRDLVNSGVTIQIMRASEYYHCWRNFVNYPPGDEAHWPQYPPLWMMLYALELHCIILSLPPCLKISRRWQNHLAFFRLHLQNCHYQTIPPHILLATGLIHPSVTWR

SEQ ID NO: 24 - protein, 236 aa, Oryctolagus cuniculus
  REGION 1..236: note = MISC_FEATURE - ocAPOBEC1 polypeptide sequence
MASEKGPSNKDYTLRRRIEPWEFEVFFDPQELRKEACLLYEIKWGASSKTWRSSGKNTTNHVEVNFLEKLTSEGRLGPSTCCSITWFLSWSPCWECSMAIREFLSQHPGVTLIIFVARLFQHMDRRNRQGLKDLVTSGVTVRVMSVSEYCYCWENFVNYPPGKAAQWPRYPPRWMLMYALELYCIILGLPPCLKISRRHQKQLTFFSLTPQYCHYKMIPPYILLATGLLQPSVPWR

SEQ ID NO: 25 - protein, 235 aa, Monodelphis domestica
  REGION 1..235: note = MISC_FEATURE - mdAPOBEC-1 polypeptide sequence
MNSKTGPSVGDATLRRRIKPWEFVAFFNPQELRKETCLLYEIKWGNQNIWRHSNQNTSQHAEINFMEKFTAERHFNSSVRCSITWFLSWSPCWECSKAIRKFLDHYPNVTLAIFISRLYWHMDQQHRQGLKELVHSGVTIQIMSYSEYHYCWRNFVDYPQGEEDYWPKYPYLWIMLYVLELHCIILGLPPCLKISGSHSNQLALFSLDLQDCHYQKIPYNVLVATGLVQPFVTWR

SEQ ID NO: 26 - protein, 224 aa, Pongo pygmaeus
  REGION 1..224: note = MISC_FEATURE - ppAPOBEC-2 polypeptide sequence
MAQKEEAAAATEAASQNGEDLENLDDPEKLKELIELPPFEIVTGERLPANFFKFQFRNVEYSSGRNKTFLCYVVEAQGKGGQVQASRGYLEDEHAAAHAEEAFFNTILPAFDPALRYNVTWYVSSSPCAACADRIIKTLSKTKNLRLLILVGRLFMWEELEIQDALKKLKEAGCKLRIMKPQDFEYVWQNFVEQEEGESKAFQPWEDIQENFLYYEEKLADILK

SEQ ID NO: 27 - protein, 224 aa, Bos taurus
  REGION 1..224: note = MISC_FEATURE - btAPOBEC-2 polypeptide sequence
MAQKEEAAAAAEPASQNGEEVENLEDPEKLKELIELPPFEIVTGERLPAHYFKFQFRNVEYSSGRNKTFLCYVVEAQSKGGQVQASRGYLEDEHATNHAEEAFFNSIMPTFDPALRYMVTWYVSSSPCAACADRIVKTLNKTKNLRLLILVGRLFMWEEPEIQAALRKLKEAGCRLRIMKPQDFEYIWQNFVEQEEGESKAFEPWEDIQENFLYYEEKLADILK

SEQ ID NO: 28 - protein, 440 aa, Mus musculus
  REGION 1..440: note = MISC_FEATURE - mAPOBEC-3-(1) polypeptide sequence
MQPQRLGPRAGMGPFCLGCSHRKCYSPIRNLISQETFKFHFKNLGYAKGRKDTFLCYEVTRKDCDSPVSLHHGVFKNKDNIHAEICFLYWFHDKVLKVLSPREEFKITWYMSWSPCFECAEQIVRFLATHHNLSLDIFSSRLYNVQDPETQQNLCRLVQEGAQVAAMDLYEFKKCWKKFVDNGGRRFRPWKRLLTNFRYQDSKLQEILRPCYISVPSSSSSTLSNICLTKGLPETRFWVEGRRMDPLSEEEFYSQFYNQRVKHLCYYHRMKPYLCYQLEQFNGQAPLKGCLLSEKGKQHAEILFLDKIRSMELSQVTITCYLTWSPCPNCAWQLAAFKRDRPDLILHIYTSRLYFHWKRPFQKGLCSLWQSGILVDVMDLPQFTDCWTNFVNPKRPFWPWKGLEIISRRTQRRLRRIKESWGLQDLVNDFGNLQLGPPMS

SEQ ID NO: 29 - protein, 429 aa, Mus musculus
  REGION 1..429: note = MISC_FEATURE - APOBEC-3-(2) (Mouse APOBEC-3) polypeptide sequence
  REGION 71..108: note = MISC_FEATURE - Nucleic acid editing domain
  REGION 288..319: note = MISC_FEATURE - Nucleic acid editing domain
MGPFCLGCSHRKCYSPIRNLISQETFKFHFKNLGYAKGRKDTFLCYEVTRKDCDSPVSLHHGVFKNKDNIHAEICFLYWFHDKVLKVLSPREEFKITWYMSWSPCFECAEQIVRFLATHHNLSLDIFSSRLYNVQDPETQQNLCRLVQEGAQVAAMDLYEFKKCWKKFVDNGGRRFRPWKRLLTNFRYQDSKLQEILRPCYIPVPSSSSSTLSNICLTKGLPETRFCVEGRRMDPLSEEEFYSQFYNQRVKHLCYYHRMKPYLCYQLEQFNGQAPLKGCLLSEKGKQHAEILFLDKIRSMELSQVTITCYLTWSPCPNCAWQLAAFKRDRPDLILHIYTSRLYFHWKRPFQKGLCSLWQSGILVDVMDLPQFTDCWTNFVNPKRPFWPWKGLEIISRRTQRRLRRIKESWGLQDLVNDFGNLQLGPPMS

SEQ ID NO: 30 - protein, 430 aa, Rattus sp.
  REGION 1..430: note = MISC_FEATURE - APOBEC-3 polypeptide sequence
  REGION 72..109: note = MISC_FEATURE - Nucleic acid editing domain
  REGION 289..320: note = MISC_FEATURE - Nucleic acid editing domain
MGPFCLGCSHRKCYSPIRNLISQETFKFHFKNRLRYAIDRKDTFLCYEVTRKDCDSPVSLHHGVFKNKDNIHAEICFLYWFHDKVLKVLSPREEFKITWYMSWSPCFECAEQVLRFLATHHNLSLDIFSSRLYNIRDPENQQNLCRLVQEGAQVAAMDLYEFKKCWKKFVDNGGRRFRPWKKLLTNFRYQDSKLQEILRPCYIPVPSSSSSTLSNICLTKGLPETRFCVERRRVHLLSEEEFYSQFYNQRVKHLCYYHGVKPYLCYQLEQFNGQAPLKGCLLSEKGKQHAEILFLDKIRSMELSQVIITCYLTWSPCPNCAWQLAAFKRDRPDLILHIYTSRLYFHWKRPFQKGLCSLWQSGILVDVMDLPQFTDCWTNFVNPKRPFWPWKGLEIISRRTQRRLHRIKESWGLQDLVNDFGNLQLGPPMS

SEQ ID NO: 31 - protein, 199 aa, Homo sapiens
  REGION 1..199: note = MISC_FEATURE - hAPOBEC-3A polypeptide sequence
  REGION 70..106: note = MISC_FEATURE - Nucleic acid editing domain
MEASPASGPRHLMDPHIFTSNFNNGIGRHKTYLCYEVERLDNGTSVKMDQHRGFLHNQAKNLLCGFYGRHAELRFLDLVPSLQLDPAQIYRVTWFISWSPCFSWGCAGEVRAFLQENTHVRLRIFAARIYDYDPLYKEALQMLRDAGAQVSIMTYDEFKHCWDTFVDHQGCPFQPWDGLDEHSQALSGRLRAILQNQGN

SEQ ID NO: 32 - protein, 373 aa, Homo sapiens
  REGION 1..373: note = MISC_FEATURE - hAPOBEC-3F polypeptide sequence
  REGION 65..99: note = MISC_FEATURE - Nucleic acid editing domain
  REGION 248..283: note = MISC_FEATURE - Nucleic acid editing domain
MKPHFRNTVERMYRDTFSYNFYNRPILSRRNTVWLCYEVKTKGPSRPRLDAKIFRGQVYSQPEHHAEMCFLSWFCGNQLPAYKCFQITWFVSWTPCPDCVAKLAEFLAEHPNVTLTISAARLYYYWERDYRRALCRLSQAGARVKIMDDEEFAYCWENFVYSEGQPFMPWYKFDDNYAFLHRTLKEILRNPMEAMYPHIFYFHFKNLRKAYGRNESWLCFTMEVVKHHSPVSWKRGVFRNQVDPETHCHAERCFLSWFCDDILSPNTNYEVTWYTSWSPCPECAGEVAEFLARHSNVNLTIFTARLYYFWDTDYQEGLRSLSQEGASVEIMGYKDFKYCWENFVYNDDEPFKPWKGLKYNFLFLDSKLQEILE

SEQ ID NO: 33 - protein, 370 aa, Macaca mulatta
  REGION 1..370: note = MISC_FEATURE - Rhesus macaque APOBEC-3G polypeptide sequence
  REGION 1..61: note = MISC_FEATURE - Cytoplasmic localization signal
MVEPMDPRTFVSNFNNRPILSGLNTVWLCCEVKTKDPSGPPLDAKIFQGKVYSKAKYHPEMRFLRWFHKWRQLHHDQEYKVTWYVSWSPCTRCANSVATFLAKDPKVTLTIFVARLYYFWKPDYQQALRILCQKRGGPHATMKIMNYNEFQDCWNKFVDGRGKPFKPRNNLPKHYTLLQATLGELLRHLMDPGTFTSNFNNKPWVSGQHETYLCYKVERLHNDTWVPLNQHRGFLRNQAPNIHGFPKGRHAELCFLDLIPFWKLDGQQYRVTCFTSWSPCFSCAQEMAKFISNNEHVSLCIFAARIYDDQGRYQEGLRALHRDGAKIAMMNYSEFEYCWDTFVDRQGRPFQPWDGLDEHSQALSGRLRAI

SEQ ID NO: 34 - protein, 384 aa, Pan troglodytes
  REGION 1..384: note = MISC_FEATURE - Chimpanzee APOBEC-3G polypeptide sequence
  REGION 1..60: note = MISC_FEATURE - Cytoplasmic localization signal
  REGION 65..100: note = MISC_FEATURE - Nucleic acid editing domain
  REGION 257..291: note = MISC_FEATURE - Nucleic acid editing domain
MKPHFRNPVERMYQDTFSDNFYNRPILSHRNTVWLCYEVKTKGPSRPPLDAKIFRGQVYSKLKYHPEMRFFHWFSKWRKLHRDQEYEVTWYISWSPCTKCTRDVATFLAEDPKVTLTIFVARLYYFWDPDYQEALRSLCQKRDGPRATMKIMNYDEFQHCWSKFVYSQRELFEPWNNLPKYYILLHIMLGEILRHSMDPPTFTSNFNNELWVRGRHETYLCYEVERLHNDTWVLLNQRRGFLCNQAPHKHGFLEGRHAELCFLDVIPFWKLDLHQDYRVTCFTSWSPCFSCAQEMAKFISNNKHVSLCIFAARIYDDQGRCQEGLRTLAKAGAKISIMTYSEFKHCWDTFVDHQGCPFQPWDGLEEHSQALSGRLRAILQNQGN

SEQ ID NO: 35 - protein, 377 aa, Chlorocebus sabaeus
  REGION 1..377: note = MISC_FEATURE - Green monkey APOBEC-3G polypeptide sequence
  REGION 1..60: note = MISC_FEATURE - Cytoplasmic localization signal
  REGION 65..100: note = MISC_FEATURE - Nucleic acid editing domain
  REGION 257..290: note = MISC_FEATURE - Nucleic acid editing domain
MNPQIRNMVEQMEPDIFVYYFNNRPILSGRNTVWLCYEVKTKDPSGPPLDANIFQGKLYPEAKDHPEMKFLHWFRKWRQLHRDQEYEVTWYVSWSPCTRCANSVATFLAEDPKVTLTIFVARLYYFWKPDYQQALRILCQERGGPHATMKIMNYNEFQHCWNEFVDGQGKPFKPRKNLPKHYTLLHATLGELLRHVMDPGTFTSNFNNKPWVSGQRETYLCYKVERSHNDTWVLLNQHRGFLRNQAPDRHGFPKGRHAELCFLDLIPFWKLDDQQYRVTCFTSWSPCFSCAQKMAKFISNNKHVSLCIFAARIYDDQGRCQEGLRTLHRDGAKIAVMNYSEFEYCWDTFVDRQGRPFQPWDGLDEHSQALSGRLRAI

SEQ ID NO: 36 - protein, 384 aa, Homo sapiens
  REGION 1..384: note = MISC_FEATURE - Human APOBEC-3G polypeptide sequence
  REGION 1..60: note = MISC_FEATURE - Cytoplasmic localization signal
  REGION 65..100: note = MISC_FEATURE - Nucleic acid editing domain
  REGION 257..291: note = MISC_FEATURE - Nucleic acid editing domain
MKPHFRNTVERMYRDTFSYNFYNRPILSRRNTVWLCYEVKTKGPSRPPLDAKIFRGQVYSELKYHPEMRFFHWFSKWRKLHRDQEYEVTWYISWSPCTKCTRDMATFLAEDPKVTLTIFVARLYYFWDPDYQEALRSLCQKRDGPRATMKIMNYDEFQHCWSKFVYSQRELFEPWNNLPKYYILLHIMLGEILRHSMDPPTFTFNFNNEPWVRGRHETYLCYEVERMHNDTWVLLNQRRGFLCNQAPHKHGFLEGRHAELCFLDVIPFWKLDLDQDYRVTCFTSWSPCFSCAQEMAKFISKNKHVSLCIFTARIYDDQGRCQEGLRTLAEAGAKISIMTYSEFKHCWDTFVDHQGCPFQPWDGLDEHSQDLSGRLRAILQNQEN

SEQ ID NO: 37 - protein, 382 aa, Homo sapiens
  REGION 1..382: note = MISC_FEATURE - Human APOBEC-3B polypeptide sequence
  REGION 66..100: note = MISC_FEATURE - Nucleic acid editing domain
  REGION 251..289: note = MISC_FEATURE - Nucleic acid editing domain
MNPQIRNPMERMYRDTFYDNFENEPILYGRSYTWLCYEVKIKRGRSNLLWDTGVFRGQVYFKPQYHAEMCFLSWFCGNQLPAYKCFQITWFVSWTPCPDCVAKLAEFLSEHPNVTLTISAARLYYYWERDYRRALCRLSQAGARVTIMDYEEFAYCWENFVYNEGQQFMPWYKFDENYAFLHRTLKEILRYLMDPDTFTFNFNNDPLVLRRRQTYLCYEVERLDNGTWVLMDQHMGFLCNEAKNLLCGFYGRHAELRFLDLVPSLQLDPAQIYRVTWFISWSPCFSWGCAGEVRAFLQENTHVRLRIFAARIYDYDPLYKEALQMLRDAGAQVSIMTYDEFEYCWDTFVYRQGCPFQPWDGLEEHSQALSGRLRAILQNQGN

SEQ ID NO: 38 - protein, 395 aa, Rattus sp.
  REGION 1..395: note = MISC_FEATURE - Rat APOBEC-3B polypeptide sequence
MQPQGLGPNAGMGPVCLGCSHRRPYSPIRNPLKKLYQQTFYFHFKNVRYAWGRKNNFLCYEVNGMDCALPVPLRQGVFRKQGHIHAELCFIYWFHDKVLRVLSPMEEFKVTWYMSWSPCSKCAEQVARFLAAHRNLSLAIFSSRLYYYLRNPNYQQKLCRLIQEGVHVAAMDLPEFKKCWNKFVDNDGQPFRPWMRLRINFSFYDCKLQEIFSRMNLLREDVFYLQFNNSHRVKPVQNRYYRRKSYLCYQLERANGQEPLKGYLLYKKGEQHVEILFLEKMRSMELSQVRITCYLTWSPCPNCARQLAAFKKDHPDLILRIYTSRLYFWRKKFQKGLCTLWRSGIHVDVMDLPQFADCWTNFVNPQRPFRPWNELEKNSWRIQRRLRRIKESWGL

SEQ ID NO: 39 - protein, 226 aa, Bos taurus
  REGION 1..226: note = MISC_FEATURE - Bovine APOBEC-3B polypeptide sequence
DGWEVAFRSGTVLKAGVLGVSMTEGWAGSGHPGQGACVWTPGTRNTMNLLREVLFKQQFGNQPRVPAPYYRRKTYLCYQLKQRNDLTLDRGCFRNKKQRHAERFIDKINSLDLNPSQSYKIICYITWSPCPNCANELVNFITRNNHLKLEIFASRLYFHWIKSFKMGLQDLQNAGISVAVMTHTEFEDCWEQFVDNQSRPFQPWDKLEQYSASIRRRLQRILTAPI

SEQ ID NO: 40 - protein, 490 aa, Pan troglodytes
  REGION 1..490: note = MISC_FEATURE - Chimpanzee APOBEC-3B polypeptide sequence
MNPQIRNPMEWMYQRTFYYNFENEPILYGRSYTWLCYEVKIRRGHSNLLWDTGVFRGQMYSQPEHHAEMCFLSWFCGNQLSAYKCFQITWFVSWTPCPDCVAKLAKFLAEHPNVTLTISAARLYYYWERDYRRALCRLSQAGARVKIMDDEEFAYCWENFVYNEGQPFMPWYKFDDNYAFLHRTLKEIIRHLMDPDTFTFNFNNDPLVLRRHQTYLCYEVERLDNGTWVLMDQHMGFLCNEAKNLLCGFYGRHAELRFLDLVPSLQLDPAQIYRVTWFISWSPCFSWGCAGQVRAFLQENTHVRLRIFAARIYDYDPLYKEALQMLRDAGAQVSIMTYDEFEYCWDTFVYRQGCPFQPWDGLEEHSQALSGRLRAILQVRASSLCMVPHRPPPPPQSPGPCLPLCSEPPLGSLLPTGRPAPSLPFLLTASFSFPPPASLPPLPSLSLSPGHLPVPSFHSLTSCSIQPPCSSRIRETEGWASVSKEGRDLG

SEQ ID NO: 41 - protein, 190 aa, Homo sapiens
  REGION 1..190: note = MISC_FEATURE - Human APOBEC-3C polypeptide sequence
  REGION 65..100: note = MISC_FEATURE - Nucleic acid editing domain
MNPQIRNPMKAMYPGTFYFQFKNLWEANDRNETWLCFTVEGIKRRSVVSWKTGVFRNQVDSETHCHAERCFLSWFCDDILSPNTKYQVTWYTSWSPCPDCAGEVAEFLARHSNVNLTIFTARLYYFQYPCYQEGLRSLSQEGVAVEIMDYEDFKYCWENFVYNDNEPFKPWKGLKTNFRLLKRRLRESLQ

SEQ ID NO: 42 - protein, 190 aa, Gorilla sp.
  REGION 1..190: note = MISC_FEATURE - Gorilla APOBEC-3C polypeptide sequence
  REGION 65..100: note = MISC_FEATURE - Nucleic acid editing domain
MNPQIRNPMKAMYPGTFYFQFKNLWEANDRNETWLCFTVEGIKRRSVVSWKTGVFRNQVDSETHCHAERCFLSWECDDILSPNTNYQVTWYTSWSPCPECAGEVAEFLARHSNVNLTIFTARLYYFQDTDYQEGLRSLSQEGVAVKIMDYKDFKYCWENFVYNDDEPFKPWKGLKYNFRFLKRRLQEILE

SEQ ID NO: 43 - protein, 202 aa, Macaca mulatta
  REGION 1..202: note = MISC_FEATURE - Rhesus macaque APOBEC-3A polypeptide sequence
  REGION 72..103: note = MISC_FEATURE - Nucleic acid editing domain
MDGSPASRPRHLMDPNTFTFNFNNDLSVRGRHQTYLCYEVERLDNGTWVPMDERRGFLCNKAKNVPCGDYGCHVELRFLCEVPSWQLDPAQTYRVTWFISWSPCFRRGCAGQVRVFLQENKHVRLRIFAARIYDYDPLYQEALRTLRDAGAQVSIMTYEEFKHCWDTFVDRQGRPFQPWDGLDEHSQALSGRLRAILQNQGN

SEQ ID NO: 44 - protein, 185 aa, Bos taurus
  REGION 1..185: note = MISC_FEATURE - Bovine APOBEC-3A polypeptide sequence
  REGION 56..86: note = MISC_FEATURE - Nucleic acid editing domain
MDEYTFTENFNNQGWPSKTYLCYEMERLDGDATIPLDEYKGFVRNKGLDQPEKPCHAELYFLGKIHSWNLDRNQHYRLTCFISWSPCYDCAQKLTTFLKENHHISLHILASRIYTHNRFGCHQSGLCELQAAGARITIMTFEDFKHCWETFVDHKGKPFQPWEGLNVKSQALCTELQAILKTQQN

SEQ ID NO: 45 - protein, 200 aa, Homo sapiens
  REGION 1..200: note = MISC_FEATURE - Human APOBEC-3H polypeptide sequence
  REGION 54..88: note = MISC_FEATURE - Nucleic acid editing domain
MALLTAETFRLQFNNKRRLRRPYYPRKALLCYQLTPQNGSTPTRGYFENKKKCHAEICFINEIKSMGLDETQCYQVTCYLTWSPCSSCAWELVDFIKAHDHLNLGIFASRLYYHWCKPQQKGLRLLCGSQVPVEVMGFPKFADCWENFVDHEKPLSFNPYKMLEELDKNSRAIKRRLERIKIPGVRAQGRYMDILCDAEV

SEQ ID NO: 46 - protein, 210 aa, Macaca mulatta
  REGION 1..210: note = MISC_FEATURE - Rhesus macaque APOBEC-3H polypeptide sequence
MALLTAKTFSLQFNNKRRVNKPYYPRKALLCYQLTPQNGSTPTRGHLKNKKKDHAEIRFINKIKSMGLDETQCYQVTCYLTWSPCPSCAGELVDFIKAHRHLNLRIFASRLYYHWRPNYQEGLLLLCGSQVPVEVMGLPEFTDCWENFVDHKEPPSFNPSEKLEELDKNSQAIKRRLERIKSRSVDVLENGLRSLQLGPVTPSSSIRNSR

SEQ ID NO: 47 - protein, 386 aa, Homo sapiens
  REGION 1..386: note = MISC_FEATURE - Human APOBEC-3D polypeptide sequence
  REGION 78..109: note = MISC_FEATURE - Nucleic acid editing domain
  REGION 262..296: note = MISC_FEATURE - Nucleic acid editing domain
MNPQIRNPMERMYRDTFYDNFENEPILYGRSYTWLCYEVKIKRGRSNLLWDTGVFRGPVLPKRQSNHRQEVYFRFENHAEMCFLSWFCGNRLPANRRFQITWFVSWNPCLPCVVKVTKFLAEHPNVTLTISAARLYYYRDRDWRWVLLRLHKAGARVKIMDYEDFAYCWENFVCNEGQPFMPWYKFDDNYASLHRTLKEILRNPMEAMYPHIFYFHFKNLLKACGRNESWLCFTMEVTKHHSAVFRKRGVFRNQVDPETHCHAERCFLSWFCDDILSPNTNYEVTWYTSWSPCPECAGEVAEFLARHSNVNLTIFTARLCYFWDTDYQEGLCSLSQEGASVKIMGYKDFVSCWKNFVYSDDEPFKPWKGLQTNFRLLKRRLREILQ

SEQ ID NO: 48 - protein, 236 aa, Homo sapiens
  REGION 1..236: note = MISC_FEATURE - Human APOBEC-1 polypeptide sequence
MTSEKGPSTGDPTLRRRIEPWEFDVFYDPRELRKEACLLYEIKWGMSRKIWRSSGKNTTNHVEVNFIKKFTSERDFHPSMSCSITWFLSWSPCWECSQAIREFLSRHPGVTLVIYVARLFWHMDQQNRQGLRDLVNSGVTIQIMRASEYYHCWRNFVNYPPGDEAHWPQYPPLWMMLYALELHCIILSLPPCLKISRRWQNHLTFFRLHLQNCHYQTIPPHILLATGLIHPSVAWR

SEQ ID NO: 49 - protein, 229 aa, Mus musculus
  REGION 1..229: note = MISC_FEATURE - Mouse APOBEC-1 polypeptide sequence
MSSETGPVAVDPTLRRRIEPHEFEVFFDPRELRKETCLLYEINWGGRHSVWRHTSQNTSNHVEVNFLEKFTTERYFRPNTRCSITWFLSWSPCGECSRAITEFLSRHPYVTLFIYIARLYHHTDQRNRQGLRDLISSGVTIQIMTEQEYCYCWRNFVNYPPSNEAYWPRYPHLWVKLYVLELYCIILGLPPCLKILRRKQPQLTFFTITLQTCHYQRIPPHLLWATGLK

SEQ ID NO: 50 - protein, 224 aa, Homo sapiens
  REGION 1..224: note = MISC_FEATURE - Human APOBEC-2 polypeptide sequence
MAQKEEAAVATEAASQNGEDLENLDDPEKLKELIELPPFEIVTGERLPANFFKFQFRNVEYSSGRNKTFLCYVVEAQGKGGQVQASRGYLEDEHAAAHAEEAFFNTILPAFDPALRYNVTWYVSSSPCAACADRIIKTLSKTKNLRLLILVGRLFMWEEPEIQAALKKLKEAGCKLRIMKPQDFEYVWQNFVEQEEGESKAFQPWEDIQENFLYYEEKLADILK

SEQ ID NO: 51 - protein, 224 aa, Mus musculus
  REGION 1..224: note = MISC_FEATURE - Mouse APOBEC-2 polypeptide sequence
MAQKEEAAEAAAPASQNGDDLENLEDPEKLKELIDLPPFEIVTGVRLPVNFFKFQFRNVEYSSGRNKTFLCYVVEVQSKGGQAQATQGYLEDEHAGAHAEEAFFNTILPAFDPALKYNVTWYVSSSPCAACADRILKTLSKTKNLRLLILVSRLFMWEEPEVQAALKKLKEAGCKLRIMKPQDFEYIWQNFVEQEEGESKAFEPWEDIQENFLYYEEKLADILK

SEQ ID NO: 52 - protein, 224 aa, Rattus sp.
  REGION 1..224: note = MISC_FEATURE - Rat APOBEC-2 polypeptide sequence
MAQKEEAAEAAAPASQNGDDLENLEDPEKLKELIDLPPFEIVTGVRLPVNFFKFQFRNVEYSSGRNKTFLCYVVEAQSKGGQVQATQGYLEDEHAGAHAEEAFFNTILPAFDPALKYNVTWYVSSSPCAACADRILKTLSKTKNLRLLILVSRLFMWEEPEVQAALKKLKEAGCKLRIMKPQDFEYLWQNFVEQEEGESKAFEPWEDIQENFLYYEEKLADILK

SEQ ID NO: 53 - protein, 208 aa, Petromyzon marinus
  REGION 1..208: note = MISC_FEATURE - Petromyzon marinus CDA1 (pmCDAl) polypeptide sequence
MTDAEYVRIHEKLDIYTFKKQFFNNKKSVSHRCYVLFELKRRGERRACFWGYAVNKPQSGTERGIHAEIFSIRKVEEYLRDNPGQFTINWYSSWSPCADCAEKILEWYNQELRGNGHTLKIWACKLYYEKNARNQIGLWNLRDNGVGLNVMVSEHYQCCRKIFIQSSHNQLNENRWLEKTLKRAEKRRSELSFMIQVKILHTTKSPAV

SEQ ID NO: 54 - protein, 381 aa, Homo sapiens
  REGION 1..381: note = MISC_FEATURE - Human APOBEC3G D316R D317R polypeptide sequence
MKPHFRNTVERMYRDTFSYNFYNRPILSRRNTVWLCYEVKTKGPSRPPLDAKIFRGQVYSELKYHPEMRFFHWFSKWRKLHRDQEYEVTWYISWSPCTKCTRDMATFLAEDPKVTLTIFVARLYYFWDPDYQEALRSLCQKRDGPRATMKFNYDEFQHCWSKFVYSQRELFEPWNNLPKYYILLHFMLGEILRHSMDPPTFTFNFNNEPWVRGRHETYLCYEVERMHNDTWVLLNQRRGFLCNQAPHKHGFLEGRHAELCFLDVIPFWKLDLDQDYRVTCFTSWSPCFSCAQEMAKFISKKHVSLCIFTARIYRRQGRCQEGLRTLAEAGAKISFTYSEFKHCWDTFVDHQGCPFQPWDGLDEHSQDLSGRLRAILQNQEN

SEQ ID NO: 55 - protein, 182 aa, Homo sapiens
  REGION 1..182: note = MISC_FEATURE - Human APOBEC3G chain A polypeptide sequence
MDPPTFTFNFNNEPWWGRHETYLCYEVERMHNDTWVLLNQRRGFLCNQAPHKHGFLEGRHAELCFLDVIPFWKLDLDQDYRVTCFTSWSPCFSCAQEMAKFISKNKHVSLCIFTARIYDDQGRCQEGLRTLAEAGAKISFTYSEFKHCWDTFVDHQGCPFQPWDGLDEHSQDLSGRLRAILQ

SEQ ID NO: 56 - protein, 184 aa, Homo sapiens
  REGION 1..184: note = MISC_FEATURE - Human APOBEC3G chain A D120R D121R polypeptide sequence
MDPPTFTFNFNNEPWVRGRHETYLCYEVERMHNDTWVLLNQRRGFLCNQAPHKHGFLEGRHAELCFLDVIPFWKLDLDQDYRVTCFTSWSPCFSCAQEMAKFISKNKHVSLCIFTARIYRRQGRCQEGLRTLAEAGAKISFMTYSEFKHCWDTFVDHQGCPFQPWDGLDEHSQDLSGRLRAILQ

SEQ ID NO: 57 - protein, 367 aa, Homo sapiens
  REGION 1..367: note = MISC_FEATURE - hAPOBEC-4 polypeptide sequence
MEPIYEEYLANHGTIVKPYYWLSFSLDCSNCPYHIRTGEEARVSLTEFCQIFGFPYGTTFPQTKHLTFYELKTSSGSLVQKGHASSCTGNYIHPESMLFEMNGYLDSAIYNNDSIRHIILYSNNSPCNEANHCCISKMYNFLITYPGITLSIYFSQLYHTEMDFPASAWNREALRSLASLWPRVVLSPISGGIWHSVLHSFISGVSGSHVFQPILTGRALADRHNAYEINAITGVKPYFTDVLLQTKRNPNTKAQEALESYPLNNAFPGQFFQMPSGQLQPNLPPDLRAPVVFVLVPLRDLPPMHMGQNPNKPRNIVRHLNMPQMSFQETKDLGRLPTGRSVEIVEITEQFASSKEADEKKKKKGKK

SEQ ID NO: 58 - protein, 388 aa, Rattus norvegicus
  REGION 1..388: note = MISC_FEATURE - rAPOBEC-4 polypeptide sequence
MEPLYEEYLTHSGTIVKPYYWLSVSLNCTNCPYHIRTGEEARVPYTEFHQTFGFPWSTYPQTKHLTFYELRSSSGNLIQKGLASNCTGSHTHPESMLFERDGYLDSLIFHDSNIRHIILYSNNSPCDEANHCCISKMYNFLMNYPEVTLSVFFSQLYHTENQFPTSAWNREALRGLASLWPQVTLSAISGGIWQSILETFVSGISEGLTAVRPFTAGRTLTDRYNAYEINCITEVKPYFTDALHSWQKENQDQKVWAASENQPLHNTTPAQWQPDMSQDCRTPAVFMLVPYRDLPPIHVNPSPQKPRTVVRHLNTLQLSASKVKALRKSPSGRPVKKEEARKGSTRSQEANETNKSKWKKQTLFIKSNICHLLEREQKKIGILSSWSV

SEQ ID NO: 59 - protein, 363 aa, Macaca fascicularis
  REGION 1..363: note = MISC_FEATURE - mfAPOBEC-4 polypeptide sequence
MEPTYEEYLANHGTIVKPYYWLSFSLDCSNCPYHIRTGEEARVSLTEFCQIFGFPYGTTYPQTKHLTFYELKTSSGSLVQKGHASSCTGNYIHPESMLFEMNGYLDSAIYNNDSIRHIILYCNNSPCNEANHCCISKVYNFLITYPGITLSIYFSQLYHTEMDFPASAWNREALRSLASLWPRVVLSPISGGIWHSVLHSFVSGVSGSHVFQPILTGRALTDRYNAYEINAITGVKPFFTDVLLHTKRNPNTKAQMALESYPLNNAFPGQSFQMTSGIPPDLRAPVVFVLLPLRDLPPMHMGQDPNKPRNIIRHLNMPQMSFQETKDLERLPTRRSVETVEITERFASSKQAEEKTKKKKGKK

SEQ ID NO: 60 - protein, 218 aa, Rattus norvegicus
  REGION 1..218: note = MISC_FEATURE - rAPOBEC-1 (delta 177-186) polypeptide sequence
MSSETGPVAVDPTLRRRIEPHEFEVFFDPRELRKETCLLYEINWGGRHSIWRHTSQNTNKHVEVNFIEKFTTERYFCPNTRCSITWFLSWSPCGECSRAITEFLSRYPHVTLFIYIARLYHHADPRNRQGLRDLISSGVTIQIMTEQESGYCWRNFVNYSPSNEAHWPRYPHLWVRGLPPCLNILRRKQPQLTFFTIALQSCHYQRLPPHILWATGLK

SEQ ID NO: 61 - protein, 218 aa, Rattus norvegicus
  REGION 1..218: note = MISC_FEATURE - rAPOBEC-1 (delta 202-213) polypeptide sequence
MSSETGPVAVDPTLRRRIEPHEFEVFFDPRELRKETCLLYEINWGGRHSIWRHTSQNTNKHVEVNFIEKFTTERYFCPNTRCSITWFLSWSPCGECSRAITEFLSRYPHVTLFIYIARLYHHADPRNRQGLRDLISSGVTIQIMTEQESGYCWRNFVNYSPSNEAHWPRYPHLWVRLYVLELYCIILGLPPCLNILRRKQPQHYQRLPPHILWATGLK

SEQ ID NO: 62 - protein, 198 aa, Mus musculus
  REGION 1..198: note = MISC_FEATURE - mouse cytidine deaminase polypeptide sequence
  REGION 1..30: note = MISC_FEATURE - Nuclear localization sequence
  REGION 183..198: note = MISC_FEATURE - Nuclear export signal
MDSLLMKQKKFLYHFKNVRWAKGRHETYLCYVVKRRDSATSCSLDFGHLRNKSGCHVELLFLRYISDWDLDPGRCYRVTWFTSWSPCYDCARHVAEFLRWNPNLSLRIFTARLYFCEDRKAEPEGLRRLHRAGVQIGIMTFKDYFYCWNTFVENRERTFKAWEGLHENSVRLTRQLRRILLPLYEVDDLRDAFRMLGF

SEQ ID NO: 63 - protein, 224 aa, Petromyzon marinus
  REGION 1..224: note = MISC_FEATURE - pmCDA-1 polypeptide sequence
MAGYECVRVSEKLDFDTFEFQFENLHYATERHRTYVIFDVKPQSAGGRSRRLWGYIINNPNVCHAELILMSMIDRHLESNPGVYAMTWYMSWSPCANCSSKLNPWLKNLLEEQGHTLTMHFSRIYDRDREGDHRGLRGLKHVSNSFRMGVVGRAEVKECLAEYVEASRRTLTWLDTTESMAAKMRRKLFCILVRCAGMRESGIPLHLFTLQTPLLSGRVVWWRV

SEQ ID NO: 64 - protein, 331 aa, Petromyzon marinus
  REGION 1..331: note = MISC_FEATURE - pmCDA-2 polypeptide sequence
MELREVVDCALASCVRHEPLSRVAFLRCFAAPSQKPRGTVILFYVEGAGRGVTGGHAVNYNKQGTSIHAEVLLLSAVRAALLRRRRCEDGEEATRGCTLHCYSTYSPCRDCVEYIQEFGASTGVRVVIHCCRLYELDVNRRRSEAEGVLRSLSRLGRDFRLMGPRDAIALLLGGRLANTADGESGASGNAWVTETNVVEPLVDMTGFGDEDLHAQVQRNKQIREAYANYASAVSLMLGELHVDPDKFPFLAEFLAQTSVEPSGTPRETRGRPRGASSRGPEIGRQRPADFERALGAYGLFLHPRIVSREADREEIKRDLIVVMRKHNYQGP

SEQ ID NO: 65 - protein, 209 aa, Petromyzon marinus
  REGION 1..209: note = MISC_FEATURE - pmCDA-5 polypeptide sequence
MAGDENVRVSEKLDFDTFEFQFENLHYATERHRTYVIFDVKPQSAGGRSRRLWGYIINNPNVCHAELILMSMIDRHLESNPGVYAMTWYMSWSPCANCSSKLNPWLKNLLEEQGHTLMMHFSRIYDRDREGDHRGLRGLKHVSNSFRMGVVGRAEVKECLAEYVEASRRTLTWLDTTESMAAKMRRKLFCILVRCAGMRESGMPLHLFT

SEQ ID NO: 66 - protein, 158 aa, Saccharomyces cerevisiae
  REGION 1..158: note = MISC_FEATURE - yCD polypeptide sequence
MVTGGMASKWDQKGMDIAYEEAALGYKEGGVPIGGCLINNKDGSVLGRGHNMRFQKGSATLHGEISTLENCGRLEGKVYKDTTLYTTLSPCDMCTGAIIMYGIPRCVVGENVNFKSKGEKYLQTRGHEVVVVDDERCKKIMKQFIDERPQDWFEDIGE

SEQ ID NO: 67 - protein, 194 aa, synthetic construct
  REGION 1..194: note = cytidine deaminase polypeptide sequence
MKPQIRDHRPNPMEAMYPHIFYFHFENLEKAYGRNETWLCFTVEIIKQYLPVPWKKGVFRNQVDPETHCHAEKCFLSWFCNNTLSPKKNYQVTWYTSWSPCPECAGEVAEFLAEHSNVKLTIYTARLYYFWDTDYQEGLRSLSEEGASVEIMDYEDFQYCWENFVYDDGEPFKRWKGLKYNFQSLTRRLREILQ

SEQ ID NO: 68 - protein, 192 aa, synthetic construct
  REGION 1..192: note = cytidine deaminase polypeptide sequence
MADSSEKMRGQYISRDTFEKNYKPIDGTKEAHLLCEIKWGKYGKPWLHWCQNQRMNIHAEDYFMNNIFKAKKHPVHCYVTWYLSWSPCADCASKIVKFLEERPYLKLTIYVAQLYYHTEEENRKGLRLLRSKKVIIRVMDISDYNYCWKVFVSNQNGNEDYWPLQFDPWVKENYSRLLDIFWESKCRSPNPW

SEQ ID NO: 69 - protein, 280 aa, synthetic construct
  REGION 1..280: note = cytidine deaminase polypeptide sequence
MDPQRLRQWPGPGPASRGGYGQRPRIRNPEEWFHELSPRTFSFHFRNLRFASGRNRSYICCQVEGKNCFFQGIFQNQVPPDPPCHAELCFLSWFQSWGLSPDEHYYVTWFISWSPCCECAAKVAQFLEENRNVSLSLSAARLYYFWKSESREGLRRLSDLGAQVGIMSFQDFQHCWNNFVHNLGMPFQPWKKLHKNYQRLVTELKQILREEPATYGSPQAQGKVRIGSTAAGLRHSHSHTRSEAHLRPNHSSRQHRILNPPREARARTCVLVDASWICYR

SEQ ID NO: 70 - protein, 555 aa, synthetic construct
  REGION 1..555: note = pYY-BEM3.1; tr|F7B644|F7B644_HORSE polypeptide sequence
MPRGRARERQRRNPMEKLDAEAFSFHFLNMEFVYDRNCSYLCYQVEGRLSGSPVLSEQGVFPNEVCGKTRRHAELCFLDWFRGRLSPDEYYCVTWFISWSPCSNCAREVAEFLKRHRNVELSIFAARLYYCRDHEQGLQSLCNRGAQLAVMLRKDFTYCWDNFVHNSGREFSPWENIDANSDLLARKLEDLLKNPMEKLHRKTFSFHFRNLKFAKGRKCSYLCYRVEGRLSGSPGLSEQGVFLNEVCDENCRHAELCFLHWFRGRLSPHADYRVTWFISWSPCSNCAREVAEFLKQHRNVELHISAARLYYWQRNKPGLRNLRSSGAQLAIMFFWDFRDCWDNFVHNSGRHFIPWKKINVNSRLLATKLEDLLKNPLEKLHPNTFSFHFCNLEFAYDRKYSYLCYQVEGRLSGSPGLSEQGVFLNEVCGKTRCHAELCFLDWFRVRLSPDEYYRVTWFISWSPCFYCAREVADFLKQYRNVKLSIFAARLYYCRDHAQGLRSLCSSGAQLAIMFFWDFRYCWDNFVHNSGREFRPWKKINVNSRLLATKLEDILK

SEQ ID NO: 71 - protein, 437 aa, synthetic construct
  REGION 1..437: note = pYY-BEM3.2; tr|D1LZA1|D1LZA1_PANTI polypeptide sequence
MEPWRPSPRNPMDRIDPKTFRFQFPNLRYASGRKLCYLCFQVERDYFYYNDSDWGVFRNEVHPWAPCHAEQCFLSWFRDQYPYRDEDYNVTWFLSWSPCPTCAEEVVEFLEEYRNLTLSIFTSRLYYFWHPNYQEGLCKLWDAGVQLDIMSCDEFEYCWDNFVYHKGMRFQRRNLLKDYDFLAAKLQEILSPGQQRKRDWPFPPRPGAQVDPRSWVQEVTEPGINTRRHPLHLLVSFLLPRPTMNPLQEDIFYRQFGNQHRVPKPYYYRRKTYLCYQLKLPEGTLIDKDCLRNKKKRHAEICFIDKIKSLTRDTSQRFEIICYITWSPCPFCAEELVAFVKDNPHLSLRIFASRLYVHWRWKYQQGLRHLHASGIPVAVMSLPEFEDCWRNFVDHQDRLFQPWRNLDQYSESIKRRLGKILTPLNDLRNDFRNLKLE

SEQ ID NO: 72 - protein, 440 aa, synthetic construct
  REGION 1..440: note = pYY-BEM3.3; tr|A0A3Q0DM17|A0A3Q0DM17_TARSY polypeptide sequence
MPMKRMYSNIYFDHFNNQRLLSGQNAPWLCFKVERVENCMLVPLETGVFGNQVSGCCGKTERPVEPTSLTRSVLVSPNPGTELRAQQPSRKGHLGKLGCVEYPSPGLALVMLGYGASTYCPDSSMYCPETCHHPEMCFLYWFEKTLSHEEQYQITWYVSWSPCVNCAEEVAEFLSVHPKVNLTIYAARLYCYQKLNHRQGLRRLCKEGACVKIMNYEEFDHCWENFVYNNYKSFKPWVKLQDNYELLATELDKILRIPMERMPQKKFRFHFQNLIAKDRNTTWLCFEVKNVRKKHPPDLLERGIFQNQVTPRINCHAEMCFLSWFLENMLLHGKRYQVTWYISWSPCSICAEEVAEFLSAHPKVSLTIYAARLYYFWVPGYRQGLRRLVEEGARVEIMNYEEFDYCWENFVSINNEPFQPWEGLHEKYGYLVTKLNNILG

SEQ ID NO: 73 - protein, 453 aa, synthetic construct
  REGION 1..453: note = pYY-BEM3.4; tr|A0A3Q0DNJ5|A0A3Q0DNJ5_TARSY polypeptide sequence
MEDNPEPRPRQQMDQDTFIFNFNNDPSVRGRHQTFLCYEVEHLDDDTWVPQDKYLGFLHNQPQSRSNAYCAYHAELCFLELVSSWQLDPAQRYRVTCFISWSPCSSCAQEVAAFLKKNRHVTLRILAARIYDYYQGYEDGLRTLQGVGVDITVMTSAEFGHCWNTFVDHQGSPFQPWEGLDQHSQVIWQRMQDILQVIPAKYLMEKVKYTVTVDILFKGRVPGPRYLMDQNTFTRNFINNLSVSGRRQTLLCYEVERLGGDIWVPLDQLRGFLLSQARDVLNYYQGRHAEPCFLDLVSSWQLDPAQHYRVTWFISWSPCTSCAQAVAAFLRENRHVTLRILAARIYDYHQGYEEGLRTLQRTGAHIDIMTFKEFGHCWNTFVNHKGSPFKSWTGLDQHSQALRKRLQDILHTMASSLWDQSEPKKPIPSQEVTLPESIPPSHGNRFRLVKRPS

SEQ ID NO: 74 - protein, 424 aa, synthetic construct
  REGION 1..424: note = pYY-BEM3.5; tr|G5AYU5|G5AYU5_HETGA polypeptide sequence
FCFLSCVHRKPIERIYKKAFRFYFRNLRCAYGRNKTFLCYEVKRERDNKVLHKGVVLNQVEPYMPLHAELRFLSWFHDTLLCPLGSYQVTLYVSWSPCSECAEELTTFLAGHRNVTMTIYVAQLYYCNWKSPNREGLKILIAEDARLRVMFYDEFLYCWRNFVKNDYNNFDPWSLLDENSRYHNRILQNILKGWGRPHRVGPEGEQTATPGGSGGHCISVFSLLRRREMTLKEETFRVQFNNAYKAPKPYRRRVTYLCYQLQEANGDPLTKGCLRTKKGYHAESRFIKRICSMDLGQDQSYQVTCFLTWSPCPHCAQELVSFKRAHPHLRLQIFTARLFFHWKRSYQEGLQRLCRAQVPVAVMGHPEFAYCWDNFVDHQPGPFEPPWAKLEYYSSCLKRRLQQILRSWGVDDLTNDFRNLQLGP

SEQ ID NO: 75 - protein, 385 aa, synthetic construct
  REGION 1..385: note = pYY-BEM3.6; tr|A0A2Y9QMV5|A0A2Y9QMV5_TRIMA polypeptide sequence
MLSSPQTPGTRKPMKTLAPDEFSFNFENLRLAHGRNTTFLCFQVETKAPPSLNSPDSGIFQNQDHCPSHHHAEMVFLTWFQKRLSPAQHYEVTWYMSWSPCSRCAVQVAKFLKSNSTVNLSIFVARLYYPRELETKDGLHSLWQAGAQVQIMFFQDFKYCWENFVNNEGKPFQPWKNLDENSKDWDTELKDIHRNTTDLLTEEMFYSQFYNREKKSSIPRKTYLCYQLNEPQPVKRCLHYKKGYHAVTRFIDGIVSMNLDPARSYDITCYFTWSPCNRYARKLVSFIEDYPNLRLKVYTSRLYFHWCWTNMQGLQHLQNSRVTVAVMTFRDFEYCWKNFVDNQGKPFEPWEKLDLYSQSTERRLRRILKPLTPDVLNEDFGNLHL

SEQ ID NO: 76 - protein, 381 aa, synthetic construct
  REGION 1..381: note = pYY-BEM3.7; tr|H0XHI0|H0XHI0_OTOGA polypeptide sequence
LSCAFRDPMNRMYPKTFCQNFEKEPCPSNQNSSWLCFEVETKNSAVFFHRGVFRNQPAPPPRAPTSVLLSQGPVKTPCHAEECFLTWIQGVLPPDHHYHVTWYVSRGPCANCANLIVHFLAMHRRVTLTIFAAHLNFFWESDFQQGLLRMDQEGVQLHIMGYEEFEYCWDNFVYNQRKQFVPWNGLNENYEFMVSTLEDILRSPLDRIRQKDFSIHFRNSLWLDDKSTWLCFEVKRTKSPVPLYRGVFRNQSPPKTPCHAEVRFFTWLQDLPPDFCCQFTWYLSWSPCADCADLVANFLAKHRNVSLTIFVARLYYYRDPEMHRGLRRMYQEGANVDIMSVIEFEYCWDNFVYNQGKQFVPWNGLNENYEFLVPRLQEILE

SEQ ID NO: 77 - protein, 337 aa, synthetic construct
  REGION 1..337: note = pYY-BEM3.8; tr|A0A3M0K4Y7|A0A3M0K4Y7_HIRRU polypeptide sequence
MYISKKALRRHFDPRVYPRETYLLCELQWEGSRRVWIHWIRNVPDHHAEEYFLEEVFEPRNYGFCNITLYLSWSPCCTCCSKIRDFLKRNPNVKIDIRVARLIYPDYAETRSSLRELNGLQRVSIQVMEAAGLSCIESKNHRISQVERDPKGSSSPTLFTLQDHLKLSNMTESVIQDSVSIQICYQMRILGFQCHIRWKLQPEDFQRNYSPNQIGRVVYLLYEVRWRRGSIWRNWCSNNPEQHAEVNFLENHFHHRPQTPCSITWFLSTSPCGKCSRRILEFLKSQPNVTLEIYAAKLFRHHDIRNRQGLRNLMMNGVTIYIMNLEGNPASLCLSVD

SEQ ID NO: 78 - protein, 237 aa, synthetic construct
  REGION 1..237: note = pYY-BEM3.9; tr|A0A3P4LUZ8|A0A3P4LUZ8_GULGU polypeptide sequence
MSFEDYEYCWETFVDHKGMYFQSWDLLRDNDLLAAELKNILRSTMNPLRQEIFYHQFGNQPRAPRPYHRRKTYLCYQLQPHEGPITARVCLQNKKKRHAEIRFIDNIRALRLDRSQTFEITCYLTWSPCPTCAKALAVFVQDHPHISLRLFASRLFIHWCWKYQEGLRLLHRSRIPVAVMRLQEFEDCWRNFVDNQDEPFQPWNKLEQYSESITRRLRRILGHPQNNLENDFRNLHI

SEQ ID NO: 79 - protein, 221 aa, synthetic construct
  REGION 1..221: note = pYY-BEM3.10; tr|G5BPM8|G5BPM8_HETGA polypeptide sequence
RRRIEPWQFEASFDPRQLRRETCLLSEVRWGTSPRAWRGCSLNTARHAEVSFMDRLTSEGRLRGPVRCSITWFLSWSPCGACAQAIGEFLRQHPNVSLVIYIARLFWHVDEQNRQGLRDLVTRGVRMQVMSDPEFAHCWRNFVNYSPGQEARWPQVPPVWTWLYSLELHCILLNLPPCLKISRRHHNQLTFFQLILQNCHYQAIPSPVLLASGLIHPFVTW

SEQ ID NO: 80 - protein, 211 aa, synthetic construct
  REGION 1..211: note = pYY-BEM3.11; tr|H2M862|H2M862_ORYLA polypeptide sequence
MITKLDSVLLPKKKFIYHYKNMRWARGRHETYLCFVVKRRVGPESLSFDFGHLRNRNGCHVELLFLRHLSALCPGLWGYGATGQGRVSYSITWFCSWSPCANCSFRLAQFLSQTPNLRLRIFVSRLYFCDLEDSREREGLRMLKKVGVHITVMSYKDYFYCWQTFVARKQSKFKPWDGLHQNSVRLSRKLNRILQPCETEDFRDAFKLLGL

SEQ ID NO: 81 - protein, 353 aa, synthetic construct
  REGION 1..353: note = pYY-BEM3.12; tr|H0Y0C6|H0Y0C6_OTOGA polypeptide sequence
MYLKTFYRHFNNRPYLSRRNDTWLCFEVKTTSSNSPGSFYSGVFRNQGPRYCPWHTELCFLTWVRPIVSHHHFYQITWYMSWSPCANCAWQVATFLATHENVSLTNYTVRIYYFWRQDYRQGLLRMIEEGTQVYVMSSKEFQHCWENFVDHWGTRWVTCWNRLKKNYEFLVTRLSEILSDPKERISPNTFYNQFNNTPVPRGRKDTWLCFEVKEKNSNSPGSFHRGVFQNQVFSGTSSHARRCPPDHHYEVTWYTSWSPCAHCAWHVVNFLTSNPNVSLTIFAARLYYIYRPEIQQGLRRVFQEGAKVHIMSLKEFKYCWAKLVYNSGMRFMPWYQFNFNFLFPNTTLKGDLH

SEQ ID NO: 82 - protein, 189 aa, synthetic construct
  REGION 1..189: note = pYY-BEM3.13; tr|A0A3Q2Z5X6|A0A3Q2Z5X6_HIPCM polypeptide sequence
MDVHFMNFIYHYKNMRWAKGRNETYLCFVVKRRVGPNSLTFDFGHLRNRNGCHVELLFLRYLGRRLSYSITWFCSWSPCANCSAALSQFLSRMPNLRLRIFVARLYFCDMEDSHEREGLRLLQKAGVQVTVMSYKDYYYCWQTFVDRKKSHFKAWEDLHQNSVRLSRKLNRILQPCEMDLRDAFKLLGL

SEQ ID NO: 83 - protein, 190 aa, synthetic construct
  REGION 1..190: note = pYY-BEM3.15; tr|A0A2K6NY90|A0A2K6NY90_RHIRO polypeptide sequence
MNPHIRNPMEAMYPGTFYFHFKNLWEADNRNESWLCFAVEVIKHHSTVSWKRGVFRNQVDPETHCHAEKCFLSWFCDNTLSPKKNYQVTWYTSWSPCPECAREVAKFLARHSNVMLTIYTARLYYSQYPNYQEGLRRLNEEGVPVEIMDYEDFKYCWENFVYNGDELFKPWKGLKYNFLFLDSKLQEILE

SEQ ID NO: 84 - protein, 202 aa, synthetic construct
  REGION 1..202: note = pYY-BEM3.16; tr|Q6ICH2|Q6ICH2_HUMAN polypeptide sequence
MNPQIRNPMERMYRDTFYDNFENEPILYGRSYTWLCYEVKIKRGRSNLLWDTGVFRGPVLPKRQSNHRQEVDPETHCHAERCFLSWFCDDILSPNTNYEVTWYTSWSPCPECAGEVAEFLARHSNVNLTIFTARLCYFWDTDYQEGLCSLSQEGASVKIMGYKDFVSCWKNFVYSDDEPFKPWKGLQTNFRLLKRRLREILQ

SEQ ID NO: 85 - protein, 202 aa, synthetic construct
  REGION 1..202: note = pYY-BEM3.17; tr|G8GPV1|G8GPV1_CERNE polypeptide sequence
MDGSPASRPGHVMDPGTFTSNFNNKPWVSGQRETYLCYKVERSHNDTWVLLNQHRGFLRNQAKNRLHGDYGCHAELCFLGEVPSWRLDPTQTYRVTWFISWSPCFSGGCAEQVRAFLQENTHVRLRIFAARIYDYDFLYQEALRTLRDAGAQVSIMTYEEFKHCWDTFVDHQGRPFQPWDGLDEHSQALSGRLQAILQNQGN

SEQ ID NO: 86 - protein, 181 aa, synthetic construct
  REGION 1..181: note = pYY-BEM3.18; tr|Q1WBT6|Q1WBT6_SYMSY polypeptide sequence
MALLTAKTFRLQFNNKRRVTKPYYPRKALLCYQLTPQNGSTPTRGYFKNKKKRHAEIRFINKIKSMGLDETQCYQVTCYLTWSPCPSCAWELVDFIKAHDHLNLGIFASRLYYHWCRHQQEGLRLLCGSQVPVEVMGFPEFADCWENFVDHEEPLSFNPSEMLEELDKNSRAIKRRLEKIK

SEQ ID NO: 87 - protein, 211 aa, synthetic construct
  REGION 1..211: note = pYY-BEM3.19; tr|A0A3B4CS14|A0A3B4CS14_PYGNA polypeptide sequence
MDNTNRRKFIYHYKNVRWARGRHETYLCFVVKKRNSPDSLSFDFGHLRNRNGCHVELLFLRYIEVLCPGLWGSGVDGVRVSYAVTWFCSWSPCSNCAQRLTNFLSQTPNLRLRIFVARLYFCDEEDSLEREGLRHLQRAGVQITVMTYKDFFYCWQTFVASRERCFKAWEGLRQNSVRLSRKLNRILQVFISTPVISPLITTHLGQSWAGG

SEQ ID NO: 88 - protein, 315 aa, synthetic construct
  REGION 1..315: note = pYY-BEM3.20; tr|A0A087XZI4|A0A087XZI4_POEFO polypeptide sequence
RKVSYSVTWFCSWSPCANCSIRLAQFLHQTPNLRLRIFVSRLYFCDLEDSREREGLRILKKAGVHITVMSYKDYFYCWQTFVAKSQSKFKPWDGLHQNYIRLSRKLNRILQPALDIKKFIYHYKNLRWARGRCETYLCFVVKKKLHLFMFVIVGRNRLFDLNVTMNNKSLYLIPLHLQLLFLRHLGALCPGLWGYGVTGERKVSYSVTWFCSWSPCANCSIRLAQFLHQTPNLRLRIFVSRLYFCDLEDSREREGLRILKKAGVHITVMSYKDYFYCWQTFVAKSQSKFKPWDGLHQNYIRLSRKLNRILQVQFF

SEQ ID NO: 89 - protein, 189 aa, synthetic construct
  REGION 1..189: note = pYY-BEM3.21; tr|A0A341AEK4|A0A341AEK4_9CETA polypeptide sequence
MASDRGPSAGDATSRRRIEPWEFEVSFDPRELCKETRLLYEIKWGRSQHVWRHSGKNTTNHVECNFIEKFTSERPFHRSVSCCITWFLSWSPCWECSKAIREFLNQHPRVTLFIYVARLFQHMDPQNRQGLRDLIHSGVTIQIMGPTEYDYCWRNFVNYPPGKEAHWPRYPPPLMKLYALELHCIILVP

SEQ ID NO: 90 - protein, 180 aa, synthetic construct
  REGION 1..180: note = pYY-BEM3.22; tr|E2D879|E2D879_MUSMI polypeptide sequence
RNLISRETFNFNFENLCYAKGRKNTFLCYEVTRKDCDSPVSLCHGVFKNKGSIHAEICFLYWFHDKVLKVLTPREEFKVTWYMSWSPCFECAEQVVRFLATHHNLNLTIFSSRLYNVSDPDTQQKLCRLVQEGAQVAVMDLSEFKKCWEKFVDNDGQQFRPWKRLRTNFRYQNSKLQEIL

SEQ ID NO: 91 - protein, 221 aa, synthetic construct
  REGION 1..221: note = pYY-BEM3.23; tr|A0A2K5RDN6|A0A2K5RDN6_CEBCA polypeptide sequence
MWEAQSPGLSREWGSVAISPEDPGPLHIGRFLSCAFRHPMNAMYPGIFNFHFRNLRKAYGRNETWLCFTVEGIMNRSTVSWKSGVFRNQVGSDPFCHAEMCFLSWFRHNMLSPKKDYEVTWYASWSPCPECAGQVAEFLARHGNVRLTIFTAHLYYFWNPSFRQGLRRLSQEGASVLIMGYEDFEYCWDNFVYNDGQPFKPWKRLQDNSLSLYITLQEILQ

SEQ ID NO: 92 - protein, 206 aa, synthetic construct
  REGION 1..206: note = pYY-BEM3.24; tr|A0A2K5RDN7|A0A2K5RDN7_CEBCA polypeptide sequence
MEASPASRPRPLMGPRTFTENFTNNPEVFGRHQTYLCYEVKCQGPDGTRDLMTEQRDFLCNQARNLLSGFDGRHAERCFLDRVPSWRLDPAQTYRVTCFISWSPCFSCAREVAEFLQENPHVNLRIFAARIYDCRPRYEEGLQMLQNAGAQVSIMTSEEFRHCWDTFVDHQGHPFQPWEGLDEHSQALSRRLQAILQGNRWMILSL

SEQ ID NO: 93 - protein, 184 aa, synthetic construct
  REGION 1..184: note = pYY-BEM3.25; tr|A0A1C9CJ69|A0A1C9CJ69_CERAL polypeptide sequence
NPMKAMDPHIFYFHFKNLRKAYGRNETWLCFAVEIIKQRSTVPWRTGVFRNQVDPESHCHAERCFLSWFCEDILSPNTDYRVTWYTSWSPCLDCAGEVAEFLARHSNVELAIFAARLYYFWDTHYQQGLRSLSEKGASVEIMGYEDFKYCRENFVCDDGKPFKPWKGLKTNFRFLKRRLQEILE

SEQ ID NO: 94 - protein, 197 aa, synthetic construct
  REGION 1..197: note = pYY-BEM3.26; tr|A0A2R2Z4D2|A0A2R2Z4D2_PTEAL polypeptide sequence
MHLQVWRKVTEAWREGYTLKPWSRNPMERLYHDYFYFHFYNLPTPKHRNGCYICYQVEGTKKHSRMPLLRGVFENQESLDMMLSPGEKYRVTWYISWSPCFACVDEVIKFLREHTNVELIIFAARLYHSDILQYRQGLRKLHDAGVHVAIMSYYEFKHCLNDFVFHQGRSFCPWNDLNKNSKNLSNTLEDILRNQED

SEQ ID NO: 95 - protein, 206 aa, synthetic construct
  REGION 1..206: note = pYY-BEM3.27; tr|B7T161|B7T161_SHEEP polypeptide sequence
MTEGWAGSGLPGRGDCVWTPQTRNTMNLLRETLFKQQFGNQPRVPPPYYRRKTYLCYQLKELDDLMLDKGCFRNKKQRHAEIRFIDKINSLNLNPSQSYKIICYITWSPCPNCASELVDFITRNDHLNLQIFASRLYFHWIKPFCRGLHQLQKAGISVAVMTHTEFEDCWEQFVDNQLRPFQPWDKLEQYSASIRRRLQRILTAPT

SEQ ID NO: 96 - protein, 205 aa, synthetic construct
  REGION 1..205: note = pYY-BEM3.28; tr|A0A2R2X2G4|A0A2R2X2G4_PTEAL polypeptide sequence
MAGLGQACEGCCGQMPEISYPMGRLDPKTFSFEFKNLPYAYGRKSSYLCFQVEREQHSSPVPSDWGVFKNQFCGTEPYHAELCFLNWFRAEKLSPYEHYDVTWFLSWSPCSTCAEEIAIFLSNHKNVRLNIFVSRIYYFWKPAFRQGLQELDHLGVQLDAMSFDEFKYCWENFVDNQGMPFRCWKKVHQNYKSVLRKLNEILRRR

SEQ ID NO: 97 - protein, 309 aa, synthetic construct
  REGION 1..309: note = pYY-BEM3.29; tr|G1Q1M4|G1Q1M4_MYOLU polypeptide sequence
YAELSFLDLFQSWNLDRGRQYRLTWYMSWSPYPDCAQKLVEFLGENSHVTLRIFAADIHSLCSGYEDGLRKLRDARAQLAIMTRDELQYCWVTFVDNQGQPFRPWPNLVEHIKTKKQELKDILGNPMRRMYPKTFNFNFQNLNSYGRKSTFLCFEVETWEDGSVLDYQNGVFQNQLDPGHAELCFIEWFHEKVLFPDEVRCPDAQYHVTWYISWSPCFECAEQVAGFLNEHENVDLSISAARLYLCEDEDEQGLQDLVAAGAKVAMMAPEDFEYCWDNFVYNRGWPFTYWKHVRRNYGRLQEKLDEILW

SEQ ID NO: 98 - protein, 216 aa, synthetic construct
  REGION 1..216: note = pYY-BEM3.30; tr|A0A1S3AN78|A0A1S3AN78_ERIEU polypeptide sequence
RRIEPWEFEDFFDPRQFRPETCLLYEVRWGSSRNAWRSTARNTTRHAEVNFLERFAAERHFDKPVSCSITWFLSWSPCWECSQAIGAFLSQHPQVTLAIHVTRLFHHEDEQNRQGLRDLLARGVTLQVMGDSEYAHCWRTFVNSPPGAEGHYPRYPSDFTRLYALELHCIILGLPPCLEILRRYQNQFTLFRLVPQNCHYQMIPHLNFFVVRHYFF

SEQ ID NO: 99 - protein, 201 aa, synthetic construct
  REGION 1..201: note = pYY-BEM3.32; tr|Q4VUI3|Q4VUI3_XENLA polypeptide sequence
MTMDSMLLKRNKFIYHYKNLRWARGRHETYLCYIVKRRYSSVSCALDFGYLRNRNGCHAEMLFLRYLSIWVGHDPHRNYRVTWFSSWSPCYDCAKRTLEFLKGHPNFSLRIFSARLYFCEERNAEPEGLRKLQKAGVRLSVMSYKDYFYCWNTFVETRESGFEAWDGLHENSVRLARKLRRILQPPYDMEDLREVFVLLGL

SEQ ID NO: 100 - protein, 191 aa, synthetic construct
  REGION 1..191: note = pYY-BEM3.33; tr|E2RL86|E2RL86_CANLF polypeptide sequence
MNPLQEETFYQQFSNQRVPKPTYQRRTYLCYQLKPHEGSVIAKVCLQNQEKRHAEICFIDDIKSRQLDPSQKFEITCYVTWSPCPTCAKKLIAFVNDHPHISLRLFASRLYFHWRQKYKRELRHLQKSGIPLAVMSYLEFKDCWEKFVDHKGRPFQPWNKLKQYSESIGRRLQRILQPLNNLENDFRNLRL

SEQ ID NO: 101 - protein, 226 aa, synthetic construct
  REGION 1..226: note = pYY-BEM3.34; tr|G1LWB0|G1LWB0_AILME polypeptide sequence
SSAAPASIHLLDEDTFTENFRNDDWPSRTYLCYKVEGPDQGSGVPLGQDKGILHNKPAQGPEPSRHAECYLLEQIQSWNLDPKLHYGVTCFLSWSPCAKCAQKMARFLQENSHVSLKLFASRLYTRERWDEDYKEGLRTLKRAGASIAIMTYREFEHCWKTFVLHDQEGSCFQPWPFLHKESQKFSEKLQAILQVGVLLLSLPPPLPSSPLSSPWPFPAPLRASTG

SEQ ID NO: 102 - protein, 238 aa, synthetic construct
  REGION 1..238: note = pYY-BEM3.35; tr|A0A1U7S7K7|A0A1U7S7K7_ALLSI polypeptide sequence
MGEHWQYAGSGEYIPQDQFEENFDPSVLLAETHLLSELTWGGRPYKHWYENTEHCHAEIHFLENFSSKNRSCTITWYLSWSPCAECSARIADFMQENTNVKLNIHVARLYLHDDEHTRQGLRYLMKMKRVTIQVMTIPDYTYCWNTFLEDDGEDESDDYGGYAGVHEDEDESDDDDYLPTHFAPWIMLYSLELSCILQGFAPCLKIIQGNHMSPTFQLHVQDQEQKRLLEPANPWGAD

SEQ ID NO: 103 - protein, 220 aa, synthetic construct
  REGION 1..220: note = pYY-BEM3.36; tr|A0A2R2X2J8|A0A2R2X2J8_PTEVA polypeptide sequence
MPRIGNMNLLSEKTFNYHFGNQLRVKKPQGRRRTYLCYKLKLPNETLVKGYFINKKKNHAEIRFINKIRSLNLDQTQSYKITCYITWSPCSYCAGKLVALVKSCPHLSLQIFTSRLYYHWLWKNQAGLRYLWKINISVLVMKEPEFADCWDNFVNHQSRRFKPWEKLTQYSNSTERRLLRILRINRTDLFLAQSSEQDPGLNDLVDAIKRLFLDAHRPRD

SEQ ID NO: 104 - protein, 198 aa, synthetic construct
  REGION 1..198: note = pYY-BEM3.37; tr|A0A151P6M4|A0A151P6M4_ALLMI polypeptide sequence
MAVEEEKGLLGTSQGWKIELKDFQENYMPSTWPKVTHLLYEIRWGKGSKVWRNWCSNTLTQHAEVNCLENAFGKLQFNPPVPCHITWFLSWSPCCQCCRRILQFLRAHSHITLVIKAAQLFKHMDERNRQGLRDLVQSGVHVQVMDLPDYRYCWRTFVSHPHEGEGDFWPWFFPLWITFYTLELQHILLQQHALSYNL

SEQ ID NO: 105 - protein, 158 aa, synthetic construct
  REGION 1..158: note = pYY-BEM3.38; tr|A0A2K6MNR2|A0A2K6MNR2_RHIBE polypeptide sequence
IWLCFTMEIIKQCSTVSWKRGVFRNQVDPETHCHAERCFLSWFWEDTLSPNTNYQVTWYTSWSPCLDCAGEVAEFLARHSNVKLAIFAARLYYFWDTDYQQGLRSLSEEGTSVEIMGYEDFKYCWENFVYNGDEPFKPWKGLKYNFLFLDSKLQEILE

SEQ ID NO: 106 - protein, 182 aa, synthetic construct
  REGION 1..182: note = pYY-BEM3.40; tr|F1CGT0|F1CGT0_ANOCA polypeptide sequence
KAAILLSNLFFRWQMEPEAFQRNFDPREFPECTLLLYEIHWDNNTSRNWCTNKPGLHAEENFLQIFNEKIDIKQDTPCSITWFLSWSPCYPCSQAIIKFLEAHPNVSLEIKAARLYMHQIDCNKEGLRNLGRNRVSIMNLPDYRHCWTTFVVPRGANEDYWPQDFLPAITNYSRELDSILQD

SEQ ID NO: 107 - protein, 230 aa, synthetic construct
  REGION 1..230: note = pYY-BEM3.41; tr|C7AGG3|C7AGG3_HORSE polypeptide sequence
MDPQAPTQRGGLGQAYQGGDYVQAPGNGNTQHLLSEDVFKKQFGNQRRVTKPYYRRKTYVCYQLKLLRGPTIAKGYFRNKKKRHAEIRFIDKINSLGLDQDQSYEITCYVTWSPCATCACKLIKFTRKFPNLSLRIFVSRLYYHWFRQNQQGLRQLWASSIPVVVMGYQEFADCWENFADNRGNPFQSWEKLTEYSKGIKRRLQKILEPLNLNGLEDAMGNLKLGSVDLG

SEQ ID NO: 108 - protein, 197 aa, synthetic construct
  REGION 1..197: note = pYY-BEM3.42; tr|A0A250YMK7|A0A250YMK7_CASCN polypeptide sequence
MSLLKEDIFLYQFNNQQQVQKPYFRRRTYLCYQLEQPNGSRPQWPAKGCLQNKKGHHAEIRFIKRIHSMGLEQDQDYQITCYITWSPCLACACALAELKNHFPRLTLRIFASRLYFHWIRKFQMGLQHLYKSGVLVAVMSLPEFTDCWEKFVNHRQVFFTPWDKLEEHSRSIQRRLRRILQSWDVDDLTDDFRNLRL

SEQ ID NO: 109 - protein, 189 aa, synthetic construct
  REGION 1..189: note = pYY-BEM3.43; tr|B7T160|B7T160_SHEEP polypeptide sequence
MPWISDHVARLDPETFYFQFHNLLYAYGRNCSYICYRVKTWKHRSPVSFDWGVFHNQVYAGTHCHSERRFLSWFCAKKLRPDECYHITWFMSWSPCMKCAELVAGFLGMYQNVTLSIFTARLYYFQKPQYRKGLLRLSDQGACVDIMSYQEFKYCWKKFVYSQRRPFRPWKKLKRNYQLLAAELEDILG

SEQ ID NO: 110 - protein, 541 aa, synthetic construct
  REGION 1..541: note = pYY-BEM4.1; tr|A0A182D0J1|A0A182D0J1_BLAVI polypeptide sequence
MTNPESPPQAPCDFNEDALLNREPLRGSPIKFVSPVDYPDLVFALAGPVGVDIDYIQQSISDCLKSFDYSTEFIRITEIMQDIKCSKTIDCTDMLKEYQSKIEYANELRRAYRAKDLLAALTISAISKLREQIKERDEATNKSNIQPSRRKLAWVVRQLKTPEEVRLLRAVYGKQFVLVSIYSSPQRREDFLISKIKIKSRGTIDNNTSSEGAQRLIERDSKEDNEYGQNLSGTFCLGDIFVDSNNKESAIVSIDRFLNAFFGSNEISPTRDEYGMYLAKTASLRSCDLSRQVGAAIFSKTGEIISLGSNEVPKAGGGTYWTGDNADSRDIRLGHDPNEINKVEIFAEIISRLLEDKLLSNDLLNKDAASIVTILLSKNEGKRYKDLRVMDIIEFGRIIHAEMSAICDAARNGRAIIGATLFCTTFPCHLCAKHIVASGIGRIVYLEPYPKSYAKKLHSDSIQVEDHSDSEKVSFEPFIGISPSRYRELFEGGRRKDPFGEALKWKNDPRKPVIDVVVPPHFEAEKLVIAQLGKLIVSGTG

SEQ ID NO: 111 - protein, 330 aa, synthetic construct
  REGION 1..330: note = pYY-BEM4.2; tr|A0A2D6EXD2|A0A2D6EXD2_9ARCH polypeptide sequence
MIIGLVGTIGAGKQTIIDYLQEKYGYNALSCSDVLREILKKQGKPVTRDNLREIGNKTREEGGNGAIAKILLEKLRNNWKANYIVDSLRHPDEVSVLRTSPLFHLVAVDADLRIRFERVKARKREEEPTTLPAFVERDQKEMFGTGNEQRIRETMELADELVLNNGTVEELKQRIDDLNLVSDERLRPSWDDYFMRLARLAAQRSNCMSRKVGAIITKDRRVIATGYNGTPRGVKNCNEGGCERCNSAVAKGTAISECLCLHGEENAIIEAGRVRSEGATIYTSFLPCLWCTKMIIQAGLKEVVFSEVYDLHEASIKLFETSGVLIRRLK

SEQ ID NO: 112 - protein, 367 aa, synthetic construct
  REGION 1..367: note = pYY-BEM4.3; tr|F7YVM7|F7YVM7_9THEM polypeptide sequence
MNEFKYMSLALKLAKKGKYTTSPNPMVGAVIVKDGKILATGYHKKAGQPHAEINALSKLNFQAQNCEMYVTLEPCSHYGRTPPCADAIIRSGIRKVVIATLDPNPLVNGKGVEKLKNAGIEVVCGVLEEKAKKLNEKFFKYITTKIPFVALKIAQTLDGKIALKNGESKWITSEKSREYVHKLRMEYDAVLTGIGTILKDDPQLNVRLKKVYKQPLRIILDSKLKIPLSAKVLEDPSKVIILTTALADKEKLEELRSKGVEVIITNEKNGIVDLESALKILGEKKITSVMVEAGPTLLTSFLKESLFDKIYLFIAPKIFGADSKSVFSELGLEDISKSQKFSLESVKKIGEDLLLELYPKQLKKLEE

SEQ ID NO: 113 - protein, 449 aa, synthetic construct
  REGION 1..449: note = pYY-BEM4.4; tr|A0A3M6UNF1|A0A3M6UNF1_9CNID polypeptide sequence
MEEKSELENELMRSTSPKPSVPNGSKGNECEQRETRITKENLYMVLALWMEEFPVVEQTSSAKRLNKVGVVFVLPTDRVLAADCSRDGVHGVARVMVNHCGKLEGCKVFVSRKPCSLCAKLLVQSKVSRVFYLPIEPESENKGEIARADNLFKNSSVGQSVFVPCVEQKVLDKLEDKLPKEIITPDDISECRDNLLKKCGWSAEWFARAQASLPWPCFEGKMKSQVDNDFKSLIKWIAVVKAPMDKGVAFPKVKLTSDSRVVPDCDADNFPDSKTAYHMMIFAKMLARQTDDPKTGVGAVIVRGKVPDIVSLGWNGFPSKALYGEFPRASDDDRALQKKFPYVIHAEQNALMVRNVKDLTDGILFVTKPPCDECAPMIKLSGVKTIVIGEKIEKSRGGELSYNLIKEYIKEGIMTCYQMEATKTKAKRLASDPETRKRLKSSCSNSNDV

SEQ ID NO: 114 - protein, 414 aa, synthetic construct
  REGION 1..414: note = pYY-BEM4.5; tr|A0A2G3K826|A0A2G3K826_9BURK polypeptide sequence
MTKIIDDVNTAAAAVLDQATAAANQTTFAVGGVMVNNQTGEVISAIHNNVIIPLSNNVSFTFDPTAHGERQLVYWYYANKEALKLPEPNQITVITSLDPCAMCTGALLTAGFNVGVVAIDTYAGINCAQNFQFATLPANLRTKAQKNFGYYASGAANFKPLTRSYVGGPSVAFKNGVVTPANLRDCGTVFTQSVDTVRNTSNSTGLAPSQMSNPAELPSNSAILQAYRAIYKKAFTIKIDNPRLPDAQILTELKAVLADAPNARNAVAFIDPFGNLVLCMADAFNTSPVHAAFMNVTQEYAKTRWDLMNKYAQASTTDNPALYLTHPKYGTFVYLYAPDPDDSITIMSLGAYGSTMEGPIPNMFPSNLQFYYPPRNGAQFSELVPVVNELPPFYTQNVNISLMQVPGVTQAPTK

SEQ ID NO: 115 - protein, 308 aa, synthetic construct
  REGION 1..308: note = pYY-BEM4.6; tr|K1ZCJ4|K1ZCJ4_9BACT polypeptide sequence
MSSRAKKNRSTNLKKSIGQKSIENKPTDQKKDQVLVAYVPVIHEGYRRFFRHFPAVKELWLISQELSHELRSLQKDIRALKASETKKLLQTWGQFQKIKLLTPSSLAILQKTTTQLVFPDEEISHHLVEKYFAQNRVLFASFFLRWDKKSSLKKHDLQEYSEISNKEFDQMMIAIAQQEADKSDDWWRQVGGLIFKDETILLLAHNQHTPTEAEAYFAGDPRADFHQGEYLKISTAIHAEAYLIAQAAKQGISLEGADLYVTTFPCPVCAKQVAYSGIKRVFFREGYSLLDGETILKANGVKLIRVTV

SEQ ID NO: 116 - protein, 615 aa, synthetic construct
  REGION 1..615: note = pYY-BEM4.7; tr|A0A1G3PNQ8|A0A1G3PNQ8_9SPIR polypeptide sequence
MRDLPLLVLGLTGPMGAGCTRFARDISKMEPGKVIKKQGLLDQVAHEISELSKKASEIRLQCISNGKNSELAELKRLNRRLNAKLAERACLHVIAKSSLPEPLFISLNTIVIKIAVDSITAPEFAEWAKNHAKVADLLKWLRTQWESELTLYETWGQDAGRFSQDELEKMDAMFAEFERIGDEILKEDFETYFGKRNNDFSIRMFSENIRLSGNPFRPAENGGGGGKYDEPSMVMIARETDRYIRFYRTRSDQKRSHFFIIDEIKNPREAEYFRARHQNFFLVSIFSSSEIRASRMRRGLGHDAGVSDADFQHLFRELDSRDWGADDFDAHGLHRQNIYRCFNLADIAINNDVEDERFSEVLFNKFIRYYALMLSPGCVQPTPQETYMHLAYSLSLRSTCISRQVGAVITDLEDRILSLGWNEVPEGQIGCGLKVKKDYTDKENPLFEMEIWDNVITAEDLAVWDDEDSICVKDILSRIEIKTKLKSVSLTPEERADVLKALRIKRLEYSRSLHAEENAILQVASRGGVGLKDGTIYVTTFPCELCSKKIYQVGISKIYYTEPYPNSISEKVILKDGIRNIKILQFEGVKSYSYFKLFKPGFDKKDAQMLEGRGI

SEQ ID NO: 117 - protein, 291 aa, synthetic construct
  REGION 1..291: note = pYY-BEM4.8; tr|A0A1G0PGF4|A0A1G0PGF4_9BACT polypeptide sequence
MKHNNQLRKEIEKLLGQNSIIKNDELKKLQKEYKIETDELLISFLPYAAEFAKVPISKYKVGAVVLGKSGNIYFGSNMEFEAGALSATVHAEQSAVNNAWLNGETGINKIAVTAAPCGYCRQFLNELTTAKQLHVLLKDKNLEAAKVFKLTELLPEAFGPRDLEIEGGLMKVENHKLKIENINDELINAALEAANKSYAPYSKNYSGVSIQLSDGTIFSGRYSENAAYNPSLLPFQSALAFMNMNTKKGSNNKIVDAVLVEAVSNISQKDAAGTLLNSISKTKLRYYKIKN

SEQ ID NO: 118 - protein, 398 aa, synthetic construct
  REGION 1..398: note = pYY-BEM4.9; tr|A0A0P4WGY5|A0A0P4WGY5_9EUCA polypeptide sequence
MEENSSATSQPKCASRTKQGGNDLSTDMSNLSVGETKRTDFLPWDDYFMAVAFLSAMRSKDPSSQVGACIVNADKKIVGIGYNGMPIGCSDDELPWNKESLDPLQTKYMYVCHAEMNAIMNKNSSDLAGCCVYVALFPCNECAKLVIQAGIREVVFFSDKHQQKPETVASKKMLNMAGVAYRQYTPSQSKIELNLSLKEQEKSEPTADITQSSERDQNSKRKDYLSWEEYFMAMAHLSALRSKDPITQVGACIVNSKKKIVGIGYNGMPLGCNDDLMPWGNSSSNKLETKYMYVCHAGVNAIMNKNSCDVSGCTLYVALFPCNECAKVIIQAGIKTIIYASDTNKDQASILASKKMLDMAGIKYRADNLSQRKIVIDFKTIDWNSRFMNDHQNDPTCL

SEQ ID NO: 119 - protein, 259 aa, synthetic construct
  REGION 1..259: note = pYY-BEM4.10; tr|A0A3D8IG27|A0A3D8IG27_9HELI polypeptide sequence
MRKNILYFILTLFFLSGLYATSLPEDNVVSGVIYEKIDTVSAEVDHIYPMLALAIVYKDWQEKNMLNKQGHNIGLVIVDENNMPVFWVRNSVHATHNGTQHGEVRLVSNLLNCEGFNKYLDKYTLYTTLEPCIMCAGMLSMVQIPKVVYAQKDLSCGNTQEIISTAKYPRYYKAFTVENGYKKDLEECFEQYKICKNDSITDFLVNDSAKEIFRKASNDLQDYKVKFKENRRVIKVAQEFLQNIQTKDNLDVLQCPKNM

SEQ ID NO: 120 - protein, 256 aa, synthetic construct
  REGION 1..256: note = pYY-BEM4.11; tr|A0A351C8C4|A0A351C8C4_9BACT polypeptide sequence
MNELTKQSEHLRNEALRIATRSYVPYTGQQEGVIILLENGDLIPGVRVENASFQLTIPALQNALSTMYALQRTDISMIVSSIPFTDSDLAYTGGMAEIAWEMVGASLLLVAGAHIPEAGTFIDPARGENLLDVSREAALNAFIPESDFPVGSAIQTSDDVVIDGCNVEHSDWSKIICAERNVLSTARSYGLGQITTIYVSCPKEPGGTPCGACRQVIVELAPDATVWMDRGNQEPIAMKATKLLPGHFTGNVLKKQ

SEQ ID NO: 121 - protein, 301 aa, synthetic construct
  REGION 1..301: note = pYY-BEM4.12; tr|A0A1G6V2K7|A0A1G6V2K7_PEPNI polypeptide sequence
MPIVRVNEIGARLPEDWEALETAIWQAYVSREDLPDAGELDLTLVDDATIQELNKTHRQLDKSTDVLSFPMYDDRDDLAADVQAGLPVILGDIMISVPTAERQAQAYGHSFKREMAYLLVHGLLHIAGYDHMSAEEKSAMRRAEEAILADVDVPRDTAPSKTAAVLDEADVQALIDAARAARLQAYAPYSGYAVGAALLAADGRRFCGVNVENASYGATCCAERTALFAAVTAGARDFIALALVTEGDEPAPPCGLCRQALAEFSPDLAIYLAGPTGETYRRTSLAALFPEAFSLSTKESV

SEQ ID NO: 122 - protein, 528 aa, synthetic construct
  REGION 1..528: note = pYY-BEM4.13; tr|F2NP91|F2NP91_MARHT polypeptide sequence
MPVMETHALEARFKEALARLCPEGRLLAAVSGGGDSVALLYLLKAAGRDTIVAHLDHALRPDSAADAAFVEKLAQRLGFPLETEHVDVRALAHRKRINLEAAAREVRYAFLARVARRWKARCILTAHTLDDNAETVLLQILRGAGRGLGIRPLQRRVARPLLEFSRAELRAYLEARGARWLEDPTNRSLELDRNYLRHAVLPRITARFPHALEALARFSQAQQADDWALEALSARHLIPDRRWPVPAYRALPLERAPEALRRRAIRGVLEALGVRPEARLVADVEAALGGRAQTLPGGVVVRRQRGTLFFIPPTVRFPKVQPPAGLEARPPRPGDYLVFPYGRKRLVDFLNERGVPRELKRRWPVGAVGAEVRWVYGLWPEPDEDRYMRRALVLARAAARQGEVPIGAVLVRDGAVLAEAANAVEASRDATAHAELLALRTALRRVGEKVLPGATLYVTLEPCPMCYGAILEARVARVVYGVENLKAGAFTVHGLEPRVALEAGRVEGECAKVLKDFFARLRPGRDGA

SEQ ID NO: 123 - protein, 226 aa, synthetic construct
  REGION 1..226: note = pYY-BEM4.14; tr|A0A316TX77|A0A316TX77_9BACT polypeptide sequence
MINGYTPYSGNQNTCYVKGESGTFYPGVRIENVSYPLTISSVQAAVCSCLANSDNPVEYYTGDHQPELLQVWADEYDMKPGGKLPDSPLKLFDPLVPSIPDIKKELDVLTEKSVTPNSGFPVSALLQTEKGYIRGVNIELSSWALGLCAERVAISRALTAGYTQFKSIHIYAPEADFVSPCGACRQVLLEVMPDADTELYHGDGTLSKHIVSDLLPFGFTSHKLKK

SEQ ID NO: 124 - protein, 321 aa, synthetic construct
  REGION 1..321: note = pYY-BEM4.15; tr|R6VYG3|R6VYG3_9FIRM polypeptide sequence
MIHKGTQTIETKRLILRAFTPDDAEAAFENWMSDPKVTEFLRWKTHADISDSRKIVNEWANGSADPEFYQWAIVPKDVNEPIGTISVVDRNDALGIFHIGYCIGSKWWHKGITSEAFSAVIHFLFEEVGANRIESQHDPENIHSGDVMKKCGLTFEGTLRQADFNNRGIVDACVYSILQSEWQNNTSVWQRLYNAALTVQNDRVVSPFIDAGGVAAALMTKKGNIYTGICIDTASTLGMCAERNAVANMLTNGESRIDKIVAVMPDGKVGAPCGACREYMMQLDRDSGDIEILLDLETEKTVRLKDLIPDWWGAERFGDTE

SEQ ID NO: 125 - protein, 229 aa, synthetic construct
  REGION 1..229: note = pYY-BEM4.16; tr|A0A3C1HZ18|A0A3C1HZ18_9BACI polypeptide sequence
MGDIMENWNELSEPWKRCFLQAWKAYCHGSIPIGAVLVDSEGEIFLEGRNRVHELTAPEGQLCDCRIAHAEMNVLVQVKTSDYEKLSGATIYSTMEPCIQCFGAIILSRIKNISFAAIDDKLAGATTLEDRHGFIKSRNLNIAGPFSHLGEIQIILRTDFLLRIFDSEYADPLIAAHEKDYPIGVALGRHYHRNNRLQVAKKETIPFGELFNEFSFDIKRAREGYTLGK

SEQ ID NO: 126 - protein, 205 aa, synthetic construct
  REGION 1..205: note = pYY-BEM4.17; tr|A0A1M6KV24|A0A1M6KV24_9BACT polypeptide sequence
MEASQQNILLKIEGKGPVAEINFTVTLPEWLVEQVQSGSTVFLTQKEKMRFVLELARKNVAQETGGPFAAAVFSLESGELVSAGVNVVVESRCSSAHAEVVALSLAQKAVDSHDLGAAGLPRMVLVSSAEPCAMCMGAIPWSGVKQVICGARDEDVRSVGFDEGAKPLEWVEDFAERGIEVIRDVLREEATEVLWDYRERGGEIY

SEQ ID NO: 127 - protein, 207 aa, synthetic construct
  REGION 1..207: note = pYY-BEM4.18; tr|A0A2U0T9B4|A0A2U0T9B4_9RHIZ polypeptide sequence
METAELISRLLDVIEKDIAPVTAKGVARGNKLFGAAILKKSDLAVIVAETNNEIENPLWHGEMQAIKRFFELPADQRPATRDCLFLATHEPCSLCLSGITWSGFDNFYYLFSHQDSRDGFAIPYDIQILKSVYAVPEPETGTVSPARDLYNRSNDFWTSHGLQDMIAGLARSNREALLARIDDLNALYAELSERYQRDKGGKGIPLP

SEQ ID NO: 128 - protein, 231 aa, synthetic construct
  REGION 1..231: note = pYY-BEM4.19; tr|A0A2K9PN08|A0A2K9PN08_9FLAO polypeptide sequence
MSDKKESKIKISKTSESIELDEIHSLLSYSIVQKFWENDDRNGRGYNVGVILVDENKNIVDWDINSVNKTENSTQHGEMRLISRYLDKDELYSLKGYTMYPTLEPCAMCAGMMTMTNVYRTVNGQMDYFYSKALERLSIDTRECGGYPPYPRTVISEISPSSISTRLDAEYKQYTNAGNKPIITKFLSTYKAKTIYDDAFNQFINFKCKFPENKTKYENAIKFYNSLPESI

SEQ ID NO: 129 - protein, 330 aa, synthetic construct
  REGION 1..330: note = pYY-BEM4.20; tr|F4PWM7|F4PWM7_CAVFA polypeptide sequence
MRFSLSLLFVILSVLLAGVLACKDPYNPETVDYGQCASATKANYEVRSDSKVLTPADLPADELAVHESRMRHIIDIARVNNKKFVSSIYFPNGTLACIGINTGKPNMIAHGEIVAIQNCTEIHGISMYTNYSIYTTGEPCSMCASAILWSRFKTVVWSTYNSDLYCKICMSNIPIDSSYIFSRAYGLGIEAPVAIGGVVKAEGDAWFGTYCNRPTSIYYIAPKCACQDPAKVSPLKFTQTRTTVWVEGGDKVVTQWNAIISNPSNSTIVDPPIVISPSVVFKGAPWGISAASEPNTYKLSYNKVLFPGQTFSFGYSVYGLEEVAFTALEA

SEQ ID NO: 130 - protein, 193 aa, synthetic construct
  REGION 1..193: note = pYY-BEM4.21; tr|U7QZM1|U7QZM1_PHOTE polypeptide sequence
MNKTRRKLLATLGIMSISMSFIAQAGEKKTQVINNILSKQEITEHEKYMREAIKEAIKNPKHPFGAVIVNRNNGEILSRGVNTGRNNPILHGEIQAINHYITQYGNQGWENVALYTTGEPCSMCMSALVWIGIREVIWATSISVIRNSGIRQIDISAHEIAERASSFYNPITLVGGILANETDKLFLERKRGN

SEQ ID NO: 131 - protein, 319 aa, synthetic construct
  REGION 1..319: note = pYY-BEM4.22; tr|A0A081CH48|A0A081CH48_PSEA2 polypeptide sequence
MASRRHLLATQVTGNHRKLSLWHLRGWLSPYTKLVDAVYFLTTNSFYHSLQTPPVQSITMLLSSIITSLALAAQASAYREGLHPEFQSGLSINSVPATDRDHWMRLANSAIYYPPVSHPCPQAPFGTAIVNTTSNELICAIANRVGSTGDPTQHGEITAIQHCTNVMRKKGLSPQEIIAAWKQLSLYTNAEPCTMCLSAIRWAGFKEVIYGTSVGTISENGRNQIYIPSNLVLEKSYSFGHATLMLGNILTHETDPFFQHQFNESAPCPVGCERTQVGEARVKTCEPVPNWQKLVRLEYSEDSRVGSEPVAHTPLHLEL

SEQ ID NO: 132 - protein, 203 aa, synthetic construct
  REGION 1..203: note = pYY-BEM4.23; tr|A0A3D3HMU1|A0A3D3HMU1_9GAMM polypeptide sequence
MDYSDAILGAITSIRRNSKQPGVNVTDNVTDSSTQYNNDEYWMRRALALAREAGEAGEIPVGAVLVKDNQQVAGGFNQPIRSHDPAAHAEILTLREAGAVLGNYRLIDTTLYVTLEPCMMCAGALVHSRIKRLVFGAAEPKTGAAGSFIDLLTLPRLNHYMEVTGGVLGEECSVLLSDFFRRRRAEKKALKRQNSESGSDSAS

SEQ ID NO: 133 - protein, 270 aa, synthetic construct
  REGION 1..270: note = pYY-BEM4.24; tr|A0A1N5WT13|A0A1N5WT13_9ACTN polypeptide sequence
MLEKIERRLVAAAEAVVRSPSTGDAHTVAAAAMDANGDIYSGVNVFHFTGGPCAELVVIGSAAAANAPPLITIVAVGDGDRGVIAPCGRCRQVMLDLHPDVFVIVPTGDGQLAAKPVRELLPFGYVARTGSTAPRVVYFHPRHYDTISSGLKTATVRFQDSVQTGPAVFVFDDGESIRRLDAVVEKVESRRLDHLTEEDAHHEALPDSDALRDAIKTQYPMLGDGDVVDVATFRLTAISAPDPDPRSSYPPAVSRCNPAGPRADLLVGQS

SEQ ID NO: 134 - protein, 257 aa, synthetic construct
  REGION 1..257: note = pYY-BEM4.25; tr|X0SAC5|X0SAC5_9ZZZZ polypeptide sequence
MTKDGRVIASAHDTEVTDQDSTAHAEINAIRKASKIYRKDLTGCLIISTHEPCPMCTGSIIWSNISKVVYGVSIRDSIKAGRDMINLSCKEIIKKPNAEINIYDGILKKECLKLYNNDTRKLVKKFRKYEWINIEENLLNKRMQWFENNKTMIRKLKGNDLEKAYHLILMKIGIKRSEAPIVKKSESKIIFHSKNYCPSLEACIILDLDTREVCKEIYERPTEELIRRLNSKLRFTRNYDCIRPYSDYCEEIIILEK

SEQ ID NO: 135 - protein, 154 aa, synthetic construct
  REGION 1..154: note = pYY-BEM4.26; tr|A0A3B8IC10|A0A3B8IC10_9BACT polypeptide sequence
MPSHEDFIHQCLELGKEALLQGNPPVGSVIVWQDQVIGRGIENGRSSGDITQHAELLALQEAVATGQRDKLKEAIIYSTHEPCVMCAYPIRQYKIPTVVYSVAVPELGGHTSSWHLLTTEDVPKWGKAPKIITGISAEEVEALNAAFQDSLKKG

SEQ ID NO: 136 - protein, 180 aa, synthetic construct
  REGION 1..180: note = pYY-BEM4.27; tr|A0A2N9P8B9|A0A2N9P8B9_9FLAO polypeptide sequence
MFIFKLISPPVSIEVYQDKIIQKLYICFMENIFTDEYFMKKALQEAETAFQQGEIPVGAVIVIDNRIIARSHNLTEMLNDVTAHAEMQAITASANFLGGKYLKDCTLYVTLEPCQMCAGALYWSQISKIVYGATDEQRGYRAMGAQLHPKTKVISGIMQNECTHLMKDFFKQRRSKSTKD

SEQ ID NO: 137 - protein, 178 aa, synthetic construct
  REGION 1..178: note = pYY-BEM4.28; tr|K1KX30|K1KX30_9BACT polypeptide sequence
MVKNPVNNNELYFGKHSEIPMNEEQKAYMKMAVDLSRSGMESGKGGPFGCVIVKDGKVIGIGSNSVLETNDPTAHAEIVAIRDACRNLGHFQLDGCEVYTSCEPCPMCLGAIYWARPSKVFFANDKRDAAEAGFDDDFIYQELELPYEKRKIPFEQGMQDTAKEVFQEWILKEDKTLY

SEQ ID NO: 138 - protein, 196 aa, synthetic construct
  REGION 1..196: note = pYY-BEM4.29; tr|R4XI84|R4XI84_TAPDE polypeptide sequence
MSSEIEPPSTDVHKHAVAEAADESGAADAFMQIALQQAETALLNKEVPVGCVFVHQPTGTVLATGANQTNASLNGTLHAEFVAIESILRDHPPSIFRESDLYVTVEPCVMCASALRQLQVRKVYFGCGNDRFGGCGSVFSIHSDASKTGDAAYMVESGIFRKEAIMLLRRFYLLQNESAPKPALKSTRVLKEHFDE

SEQ ID NO: 139 - protein, 212 aa, synthetic construct
  REGION 1..212: note = pYY-BEM4.30; tr|A0A239CVF7|A0A239CVF7_9DELT polypeptide sequence
MSPASKKHFPSLFSFLLLTIGLICGTAHAQPQGHTADDTAATLANASLKEHEPFIRRCYQLAIDAGKKGNHPFGALLVHKGKIVLEAENTVLTDNDFTNHAEMNLIAEAARTLSRQIIPEATVYTSCAPCAMCTATLAMAGFTRIVYGVSHDALNKRFGLKGKSVSCPALFKTMGMELEFVGPVLEKEGLRVFDFWPEKDPHAQMLKKQARK

SEQ ID NO: 140 - protein, 320 aa, synthetic construct
  REGION 1..320: note = pYY-BEM4.31; tr|A0A1Q3NME1|A0A1Q3NME1_9BACT polypeptide sequence
MTEFNYDWAKLAFSSKRPLTNLKATFIIAPREISEKRFTQLLKEYLPKGDILLGISKEDYVEGLEGQPQFAMLQQKTLQKLIDKVNDASAHKVYTLRYFQRELPAIIEKLTPPRVVGIHGSWHHSFHTLPIYYLLSEKRIPYQLVAAFSDEDEARAYEVATDKKIVRPTLEGSFDDTTVLQLTDEVAKSSYDYGFQTGAILAEKVNGVYQPVAAGFNKVVPYQTYALLNGASRETNFSPANDMNHYDTIHAEMQILVEAAKQGISLKDKTLFVNLMPCPSCARTLSQTELSEIVYRIDHSGGYAVDLLTKVGKDIRRIVY

SEQ ID NO: 141 - protein, 180 aa, synthetic construct
  REGION 1..180: note = pYY-BEM4.32; tr|A0A2G6N4N7|A0A2G6N4N7_9DELT polypeptide sequence
MKERTVSYSDRHFMAEALEMAESALTQGEFPVGCVIADGTAVVARGHRTGTTAGAVNEIDHAEINALRHLGLAGEHLDRTDLTIYSTMEPCLMCFAAIVLSGINRIVYAYEDVMGGGTGCDLTGLPPLYRDAPLTLVAGVRRRASLNLFRRFFTDPENGYWAGSLLSRYTLNQTKDSHRL

SEQ ID NO: 142 - protein, 156 aa, synthetic construct
  REGION 1..156: note = pYY-BEM4.33; tr|A0A0G0RBB8|A0A0G0RBB8_9BACT polypeptide sequence
MQSVQYNKLTHLQRRALDEAEQVLENSYNPYSHFYVGACLISEDEQLIAGTNFENAAYGSAICAERAAVLRANAMSIRRFRGIAIIARGEDFNTTEVTGPCGSCRQVLYEISQVSGCDLQVILATSKKDKIVITTIRELLPLAFGPLDLGVDIGKY

SEQ ID NO: 143 - protein, 217 aa, synthetic construct
  REGION 1..217: note = pYY-BEM4.34; tr|A0A327L2Q5|A0A327L2Q5_9RHIZ polypeptide sequence
MVTSRDGEDEAMMARCVALSRIAVGKGEYPFGAVVAREGRIVAEAINRTIRDGDVSRHAEVIALARAQKAIGRRELRECSLYSNVEPCAMCSYCIREAWVGRVVYALGSPVMGGVSKWNILRDDGLSGRMPQVFDAAPEVVSGVLVEQAQAAWRDWSPLAWEMITLRGLMTDPSARPECRTRAARPRSLWHHLVALIERPPRPYVDPTSAAEGHADL

SEQ ID NO: 144 - protein, 162 aa, synthetic construct
  REGION 1..162: note = pYY-BEM4.35; tr|S2DR30|S2DR30_9BACT polypeptide sequence
MKMKKKIEITVSLEVIQKSEWSKEDRSLIERAIHAVEHAHAPYSNFMVGTALLLDNGQIFSANNQENVSFPVGICAERAVLSYAMGNFPNNRPVKLAVVAKRRSDSTWATVTPCGLCRQTINEYEVKFGHPIEILMLNPGEEILKASGIDQLLPFRFNDLNS

SEQ ID NO: 145 - protein, 153 aa, synthetic construct
  REGION 1..153: note = pYY-BEM4.36; tr|A0A369QGF1|A0A369QGF1_9BACT polypeptide sequence
MEEHEKWMHWCLNLAQQALQQGDFPVGAVVVQKGKLIGQGVEAGQLKKDITCHAEMEAIRDARQTINTADLQNCILYSTHEPCIMCSYVIRHHKISRVVVGTTVPEVGGSSSAYPLLSAPDISIWVAPPHLVTGVLAEACQALSQAYKQKFKK

SEQ ID NO: 146 - protein, 159 aa, synthetic construct
  REGION 1..159: note = pYY-BEM4.37; tr|A0A1W6X4U4|A0A1W6X4U4_9RHIZ polypeptide sequence
MTNPSRQERWDRRFLELAKVFGTWSKDRSAGTGCVIVGPDRLLRASGYNGFARGIDDEVPERHERPAKYSWTEHAERNAIYNAAKLGISLDGCTAYVNWFPCIDCARAIVQAGIVRLVGLHPDHADQRWGSEFKFATEMLRESGIEIILYDIPELAARK

SEQ ID NO: 147 - protein, 490 aa, synthetic construct
  REGION 1..490: note = pYY-BEM4.38; tr|A0A238BW09|A0A238BW09_9BILA polypeptide sequence
MEEMARKIRTKAKKANSYCNTMTFLISKASIVLLKAECKRIELTVVIFRFLIKMNASEPNNELCDMTVIKSMLKITHVIFDLDGLLIDTEVVFSKVNQCLLSKYNKKFTPHLRGLVTGMPKKAAVTYILEHEKLSAKVDVDEYCKKYDEMAEEMLPKCSLMPGVMKLVRHLKTHSIPMAICTGATKKEFEIKTRYHKELLDLISLRVLSGDDPAVKRGKPAPDPFLVTMDRFKQKPEKAENVLVFEDAANGVCAAIAAGMNVIMVPDLTYMKIPEGLQNKINSFSDNLIISNDLNVALMSLKKELSEEEVHFLNRAFEIAVDAVLNNEVPVGCVFVFEGQEVAFGRNDVNRTKNPTYHAEMVALKMMKQWCMDNGRDLEEIMRRTTLYVTLEPCIMCASALYHLRLKKILYGAANERFGGLVSVGTREKYGAKHFIEIMPNLSVDRAVKLLKEFYEKQNPFCPEEKRKVKKPKKSGNNNDNSDDAVALNV

SEQ ID NO: 148 - protein, 159 aa, synthetic construct
  REGION 1..159: note = pYY-BEM4.39; tr|A0A1J5H6Z0|A0A1J5H6Z0_9BACT polypeptide sequence
MAYQPSEKFMQMAIDKTREGVLSGQTPFGACIVKDGKVVACEHNTVWQDTDITSHGEVHTIRAACKAIGSIDLSGCILYSTCEPCPMCFSAIHWARIDTVVYGAFIADAQDAGFNELTISNEKMKEFGGSPVNFISGFMRDENVALFKLWKEQGANNVY

SEQ ID NO: 149 - protein, 168 aa, synthetic construct
  REGION 1..168: note = pYY-BEM4.40; tr|A0A3C2D945|A0A3C2D945_9BACT polypeptide sequence
MKTTEIRIIVHEYQNIDELTENDQYLLHEARRITEFAYAPYSGFHVGAAILLGNGMIVKGNNQENSAYPSGLCAERVALFYANANYPDSEVKTIAISAAKNGILVNDPIKPCGGCRQTLSEAEVRFGSPIRIILDGQDSILVLHGVESLLPLSFSKKDLASPLAATGR

SEQ ID NO: 150 - protein, 214 aa, synthetic construct
  REGION 1..214: note = pYY-BEM4.41; tr|A0A1I7EYS3|A0A1I7EYS3_9BURK polypeptide sequence
MKFKLDPSRPPDEDDYYLGVALAVRRKANCTGNRVAAVIVKNKRVIATGYNGVPEDMPNCLDGGCLRCSNPGGQFKSGTRYDLCICVHAEQNALLTAARFGISVEGAHLYTTMQPCFGCAKEILQAKIEKVFYLHPWVPTDVDPVMDAAMKAEYAKIIGKLKVKKLDFDDPVATWAVTTMRQAALASDKNPDKKTPPKTAKKKVAKKKSRTSPR

SEQ ID NO: 151 - protein, 155 aa, synthetic construct
  REGION 1..155: note = pYY-BEM4.42; tr|H8GQX8|H8GQX8_METAL polypeptide sequence
MNHEHFMRRAIELARQAPQYPFGAVIVRRDDGQCVGQGFNRSDLNPTYHGEMVAINDCAVRHCAEDWRGFDLYTTAEPCAMCQGAIEWAGIGRVFYGTSIPYLQKLGWWQIDLRAAEVSARAVFRDTLIVGGILETECNALFAAARRGCFGTGSE

SEQ ID NO: 152 - protein, 156 aa, synthetic construct
  REGION 1..156: note = pYY-BEM4.43; tr|A0A0S8HZN3|A0A0S8HZN3_9CHLR polypeptide sequence
MDEHDIRFLRASFDVARNARKNGNHPFGALLVDEHGRIVMEAENTVITAKDCTGHAETNLMREASSKYDSDFLANCTIYTSTEPCPMCAGAIFWSNVRRVVYGLSEESLYEIAGRGSEEVLFLSCREIFERGKKLIEVIGPLLEDEAREVHMGFWR

SEQ ID NO: 153 - protein, 193 aa, synthetic construct
  REGION 1..193: note = pYY-BEM4.44; tr|E3SF31|E3SF31_9CAUD polypeptide sequence
MKPTTVLQIAYLVSQESKCCSWKVGAVIEKNGRIISTGYNGSPAGGVNCCEHAEEQGWLLNKPKPVLIPGHKSECVRFSQVDRFVLAKAHREAHSAWSKNNEIHAELNAILFAARMGSSIEGATMYVTLSPCPDCAKAISQSGIKKLVYCETYDKNIPGWDDILKNAGIEVFNVPKRSLDKLNWENINEFCGE

SEQ ID NO: 154 - protein, 330 aa, synthetic construct
  REGION 1..330: note = pYY-BEM4.45; tr|F8AAC6|F8AAC6_THEID polypeptide sequence
MIRAPWHEYFMLLAKIVALRSGCNSRPSGAVIVKNKRILATGYNGPMPGAWHCTDRGPGYCFRREKGIPDIDKYNFCRATHAEANAIAQAARFGISVEGASLYCTLAPCYVCLKLIASAGIKKVYYEHDYGSRDFERDQFWKEAIKEAGLEKFEQITVSQEVMEQLQEILPYPTSKRRLAPTEFLDEFEDGKKYGVPSIEVLFNKLNYLTRQALKDITFVIEKTTVTEEPEGISFYLSGKMVELSELINTVKKQINADQNFYFLAKHNAIEAKIEILREAENIRLKAFLNECPLESFKRIAESLDYILYQVSNSLSLPTRLELSVNLLRI

SEQ ID NO: 155 - protein, 158 aa, synthetic construct
  REGION 1..158: note = pYY-BEM4.46; tr|A0A2H4ZNK4|A0A2H4ZNK4_9EUKA polypeptide sequence
MKKQLSRKIQEEWMSRLLRNAYDAGTYGEVPIAAVILNESGQCIGWGRNCREKDQNPLGHAEIIALRQASYLKKSWRFNECTMLVTLEPCPMCAGALLQARINHIIYGASDYKRGGFGGVLDLSKNSSAHHKIEITRGVKSIQSCQLLETWFRRRRRV

SEQ ID NO: 156 - protein, 176 aa, synthetic construct
  REGION 1..176: note = pYY-BEM4.47; tr|A0A239N5N1|A0A239N5N1_9PSED polypeptide sequence
MEGRAGIIPFDEGGAAMGPAEEDSPMQHLAYMREALALARANVEAGGRPFGAVLVRDGEVIARAANGTHLDHDPTAHAELLALRAAGRALGSPRLDGCVVYASGHPCPMCLAAMHLSGVSAAYYAYSNADGEPYGLSTAAVYAQMAQPVEWQSLPLQALRPEDEEGLYGFWRERRP

SEQ ID NO: 157 - protein, 199 aa, synthetic construct
  REGION 1..199: note = pYY-BEM4.48; tr|A0A328VTR2|A0A328VTR2_9PSED polypeptide sequence
MHPEHLALLQQAPASTHADDTWARLCCEQALLAVEEGCYAVGALLVDGAGELLCSGRNQVFAPAYASAAHAEMRVLDQLEAEHAQVDRRSLTLYVSLEPCLMCYGRILLAGITRVRYLARDRDGGFALRHGRLPPAWANLASGLSVVQAKADPYWLDLAEHAIGRLQDRQTLRQRVIRAWRGQRTLTDEFSSTKRTHSG

SEQ ID NO: 158 - protein, 402 aa, synthetic construct
  REGION 1..402: note = pYY-BEM4.49; tr|A0A103YG48|A0A103YG48_CYNCS polypeptide sequence
YIRELHASSLRRDEHEIQNPKILVIVDRLSSPSLHVSLSLSLSLVIFPPFIPLNQTPTHMENAKVVEAKDGTIAVASAFSGHQEVVQDRDHKFLTRAVEEAYKGVECGDGGPFGAVVVHKDEVVASCHNMVLKHTDPTAHAEVTAIREACKKLNKIELSDCEIYASCEPCPMCFGAIHLSRIKRLIYGAKAEAAIAIGFDDFIADALRGTGFYQKAHLEIKQADGNGAMIAEQVFEKTKAKFAIDHKFLTRAVEEAYKGVECGDGRPFGALVVHKDEVVVSCHNMVLNYTDPTAHAEITAIREACKKLNRIELSDCEMYSSCEPCPMCFGAIQISRIKRLVYGAKAEASIASGIPIGDFISDALKGTGFHEKANFEIKQADGNGAMIAEQVFERTKAMFPKR

SEQ ID NO: 159 - protein, 195 aa, synthetic construct
  REGION 1..195: note = pYY-BEM4.50; tr|W5M1M8|W5M1M8_LEPOC polypeptide sequence
NSSTRESRVMAQMEINGGASPPKKPGKGQSAADQDMITGLINKALQAKEFAYCPYSNFRVGAALMTNDGRVFTGCNVENACYNLGVCAERTAILKAVSEGYESFRAIAVSSDLQDQFISPCGACRQVMREFGTGWDVFLTKVDGSYVRMTVDELLPMSFGPDDLKKKKVFSLQNGHEVSTQFYTHSPCEAGENNN

SEQ ID NO: 160 - protein, 134 aa, synthetic construct
  REGION 1..134: note = pYY-BEM4.51; tr|A0A3N5YPZ2|A0A3N5YPZ2_9ALTE polypeptide sequence
MSNSETEHIQALVDAAQAAQKQSYSPYSSFQVGAAIFADDGNTYSGCNIENVAYPLGQCAEATAIGMMIMQGAKRIEDIMIASPNDQVCPPCGGCRQKISEFGTAETKIHMVTRSGEVSTVTLGELLPLAFDSL

SEQ ID NO: 161 - protein, 162 aa, synthetic construct
  REGION 1..162: note = pYY-BEM4.52; tr|A0A2A9NC86|A0A2A9NC86_9AGAR polypeptide sequence
MTNSTLSNEDRTRLIQGAFQARKKTYSPYSNFPVGAALLTTDGRIIEGANIENASYGGTICAERTAIVKAVSDGYRHFAGIAVTTKMPTRVSPCGICRQVLREFCSLDMPVLLVPGDYPQRNPVDDDGADKPGVITEGGVRETTLGALLPDSFGPENLPPRA

SEQ ID NO: 162 - protein, 163 aa, synthetic construct
  REGION 1..163: note = pYY-BEM4.53; tr|A0A2D6RD43|A0A2D6RD43_9GAMM polypeptide sequence
MNIENLITENDETLIRRCIELAGESVKNGDKPFGALLAKDGNIIFESSNNAKTKVPYHAEILTLMDAQDKLNTTDLSDYALYSNCEPCPMCSFMIREYKLDKVVFSVHSPYMGGQSRWNILEDDVLTRFKPYFSKPPNVVGGVLESEGKRIFDKVGLWMFGKE

SEQ ID NO: 163 - protein, 204 aa, synthetic construct
  REGION 1..204: note = pYY-BEM4.54; tr|A0A0H3AVL6|A0A0H3AVL6_BRUO2 polypeptide sequence
MHAKGYSQQERRIIPFANRFRFRELCSNKSLHGLRAKFPEQYTKWDPMRKAASITKANSATPMDIALEEAHAAGERGEVPIGAVIVRDGEIIARAGNRTREFNDVTAHAEILTIRQAGEMLGSERLIDCDLYVTLEPCAMCAAAISFARIRRLYYGASDPKGGGIEHGGRFYTQPTCHHAPEIYPGFCEADARKILKDFFREKR

SEQ ID NO: 164 - protein, 165 aa, synthetic construct
  REGION 1..165: note = pYY-BEM4.55; tr|A0A242H531|A0A242H531_9ENTE polypeptide sequence
MFIVKNNIEVIQQQAELDAKFMKQALKLAKDASNNGNEPFGAVLVKNDKVILTGENQIHTESDPTYHAELGIIRDFCTSQKITDLSEYTLYTSCEPCCMCAGAMVWSNLDRMVYGLGHDELAEIAGFNIMIGSEEIFSKSPNRPEVAKGVLKEAAVPVYVDYFQR

SEQ ID NO: 165 - protein, 181 aa, synthetic construct
  REGION 1..181: note = pYY-BEM4.56; tr|A0A2R6XZE2|A0A2R6XZE2_9BACL polypeptide sequence
MSGRISWHEYFMAQAKLIALRATCTRLMVGAVIVRDRRVIAGGYNGSIAGDEHCIDVGCKVRDGHCIRTIHAEQNALMQCAKFGVSTDGAELYVTHFPCLNCTKLLIQAGIRHIYYEVPYRVDPYAIELLEKAGVGTTQITVDLNAYVQVMSKVSTDPALTYVPESKAQKDEYGQSVGKIV

SEQ ID NO: 166 - protein, 173 aa, synthetic construct
  REGION 1..173: note = pYY-BEM4.57; tr|A0A139SHT6|A0A139SHT6_9BACT polypeptide sequence
MSEANASSESLPSRNSPVELIAEAAGKFGRRPTWDEYFMATAVLISTRSSCERLNVGCVIVTAGESHKNRIVAAGYNGHLPGSPHTSRMRDGHEQATVHAEQNAISDAARRGSSVEGCTAYVTHYPCINCAKILASAGIAKICYRLDYHNDPLVKPMLAEAGIEIVQLGEAAS

SEQ ID NO: 167 - protein, 170 aa, synthetic construct
  REGION 1..170: note = pYY-BEM4.58; tr|A0A261DBH2|A0A261DBH2_9RICK polypeptide sequence
MVMKKKLITVKRSTEFNNFFMEEALKQAQFALDKNEIPVGAIIVNRITNKVIAKAHNIVEQTKNPVLHAEIVAINQSCQILSSKNLSDCDMYVTLEPCVMCSGAISFARIGRLFYAANDPKQGAIENGGRFFNSKSCFYRPEIYSGFSAKISENLIKEFFYNVRYQKCNP

SEQ ID NO: 168 - protein, 146 aa, synthetic construct
  REGION 1..146: note = pYY-BEM4.59; tr|A0A2N0XZK6|A0A2N0XZK6_9VIBR polypeptide sequence
MTDNSLHESYMRQAFELSKSALPGCRPNPPVGCVFVKDGEVVSSGFSQPPGNHHAEAGAIAAYTGSYDGLVAYVTLEPCSFQGRTPSCAKALVRVRPEKVYVAILDPDTRNSGAGIKILEDAGIDVEVGLLGEEVASFLNPYLIRN

SEQ ID NO: 169 - protein, 159 aa, synthetic construct
  REGION 1..159: note = pYY-BEM4.60; tr|A0A1V5R0F9|A0A1V5R0F9_9BACT polypeptide sequence
MTKKETTKLHALDDFCMKKALLLAKRAFRADEVPVGALVVDSSNKVIGRGYNQVEKRKSQRAHAEQLAIEQACKKIGDWRLEGCTLYVTLEPCTMCMGLIKLSRIERVVFGAASPLFGYQLDKNRKSQLYKKGVIKIRKGVGKATAAALLKDFFKNKRM

SEQ ID NO: 170 - protein, 167 aa, synthetic construct
  REGION 1..167: note = pYY-BEM4.61; tr|A0A2W0H8Y3|A0A2W0H8Y3_9BACI polypeptide sequence
MKNNGRLDHEYFMTEALQEAKEAGQRGDLPIGAVIVHNGRIIARGSNMRKTAGIKISHAENNAMHNCAPYLMKHASECVIYTTLEPCIMCLTTLVMANIDSIVFAADDKYMNMKPFIDANSYIRDRIHQYKGGVCRGESEALLRKYSPYAAELALNGTHPHHRKGGA

SEQ ID NO: 171 - protein, 165 aa, synthetic construct
  REGION 1..165: note = pYY-BEM4.62; tr|A0A261BDB7|A0A261BDB7_CAERE polypeptide sequence
LYKLYIFRMTTTKANLTQFEQELVDKAVGAMEKAYCKYSGFKVGAALVCEDGEIIIGANHENASYGATICAERSAMVTALTKGHRKFKLLAVATELEAPCSPCGICRQYLIEFGDYKVILGSSTSDQIIETTTYGLLPYAFTPKSLDDHEKEAEERNHQEGEKKH

SEQ ID NO: 172 - protein, 162 aa, synthetic construct
  REGION 1..162: note = pYY-BEM4.63; tr|A0A2E1PHI6|A0A2E1PHI6_9GAMM polypeptide sequence
MKELLIHSWLMLNSNSKLIMERVIELSEINLKNGKIPIAAVIVDKKNYEIISESQNEDSPIGHAELLAITKALKKLNTNRLDSTNLFVTIEPCPMCAYAISKCHINRLYFGSEDEKGGGVINGPRIFESHNLKKIDYVSHCYHEKTTQLMQSFFQLKRNQQL

SEQ ID NO: 173 - protein, 133 aa, synthetic construct
  REGION 1..133: note = pYY-BEM4.64; tr|A0A378LUA7|A0A378LUA7_9GAMM polypeptide sequence
MDTIIKKMISNAHNTLAHSYSPYSKFSVASCICTDKDNFYTGVNVENSAYGLAICAETSAISAMVTAGEKRIKSMVVMAGTNILCSPCGACRQRIYEFSTPDTLIHLCDKNSILRTFKINELLPEAFKFDFNP

SEQ ID NO: 174 - protein, 370 aa, synthetic construct
  REGION 1..370: note = pYY-BEM4.65; tr|A0A139HQ78|A0A139HQ78_9PEZI polypeptide sequence
MADSLKSKPGHARHDTALIHGLSQSDVQKLSESCVDAKSKAYCPYSHFRVGCAVLLANGDVVQGANVENAAYPVGTCAERVALGTAVGAKKGDFRALAVSTDISPPASPCGMCRQFIREFCELNTPILMYDKDGKSVVMTLEQLLPMSFGPDKLLPPGQLENGLMQTQTQSSFVTRAFSTTSSRRQDDTPQVPQSHYDFFPQTFPQGPPPKTSFSPDLKQLRKEFLQLQAKAHPDLAPQDQKRRAEALSMRINEAYKTLQSPLRRAQYLLSQQGIDVEDETAKLDDSSLLMEVMEAREAVEEVEDEEQLNEIRAENNGRIEESVRVLEDAFRDNEFEKAAQEAIRLRYWVNIEESIQGWEKGNGGGILHH

SEQ ID NO: 175 - protein, 165 aa, synthetic construct
  REGION 1..165: note = pYY-BEM4.66; tr|A0A2A9FXV0|A0A2A9FXV0_9VIBR polypeptide sequence
MCNLKENKDMDKYFHFACDATIEGMREGTGGPFGATLTRNGEVVCSVANTVLKDMDISGHAEMVAVREACKKLDTLDLSDCVMYATCEPCPMCVSVMLWAGIKTCYYASTHLDAAKHGFSDQQLRDYLDGSDTSTLNMVHIEDNRDDCAKIWTEFRHLNETKNDG

SEQ ID NO: 176 - protein, 509 aa, synthetic construct
  REGION 1..509: note = pYY-BEM4.67; tr|A0A1A8AG96|A0A1A8AG96_NOTFU polypeptide sequence
MEHSDRWSRAEPGLSTSSRETRDGSTQTDCKLQGHGPRLSKVNLFTLLSLWMELFPQEQDEENGQSQIRRSGLVVVREGKVVGLHCSGADLHAGQAAILQHGASLANCQLFFSRRPCATCLKMIINAGVRQITFWPGDPEISMLTSNQTHSQRTSQSITEASLDATAVEKLKSNSRPQICVLMQPLAPGVLQFVDETSRRSDFMERMMDDDPELDSEKLFNSDRLRHLKDFCRHFLIQTDQRHKDILSQMGLKNFCVEPYFSNLRSNMTELVEVLAAVAAGMPQQHYGFYREESLSLDPHPVDVSQAVARHCIVQARLLSYRTEDPKVGVGAVIWAKGQSACCCGTGRLYLIGCGYNAYPAGSKYAEYPQMDNKQEDRERRKYRYIVHAEQNALTFRTRDIKPDECSMLFVTKCPCDECIPLIRGAGVKHIYTSDQDRDKDKGDISYLRFGSLKGVCKFIWQRSPPVSSASSLHLTNGCVGKHVRQAEQQIYKNKKLCTKGSSGSSDIC

SEQ ID NO: 177 - protein, 148 aa, synthetic construct
  REGION 1..148: note = pYY-BEM4.68; tr|A0A3E2VN88|A0A3E2VN88_9FIRM polypeptide sequence
MEKEITNMDKQKLIQMAVDGLGRSYAPYSHFHVSAALLCADGTVYTGNNIENAAYTPSVCAERCAIFKAVGDGRREFEAIAVCGGPDGVIEDYCPPCGVCRQVMREFCDPSSFRVLVAKTAEDYREYTLEQLLPDGFGPDHLTGSGER

SEQ ID NO: 178 - protein, 221 aa, synthetic construct
  REGION 1..221: note = pYY-BEM4.69; tr|A0A2D5ZRJ2|A0A2D5ZRJ2_9BACT polypeptide sequence
MARPVHLHTGERRTEEGATESRAVAAVATAITRAPRAPPRPATGRERDGPPPRRVFGGGLRVGDPSGYDRGESKPIGGPLTEKRSDWHSYFMRIAGEVATRATCDRKHVGAVIVRNRTILSTGYNGSIRGMPHCDDVGHDMVDGHCIATIHAEANAILQAARNGVMIQDGSIYITASPCWNCFKLVANAGLKRVYYGEFYRDKRSFEVARRLGIDLMHIEV

SEQ ID NO: 179 - protein, 155 aa, synthetic construct
  REGION 1..155: note = pYY-BEM4.70; tr|A0A1B8WPS3|A0A1B8WPS3_9BACI polypeptide sequence
MEGVQLIYQFQWGNLIMTVNKEDLYLIDVARNTIKTLYVDGKHHVGAAVRTKTGKIYSAVHLEANIGRVSVCAEAIALGKAISEGESEFDTIVAVRHPDPTQENQKIEVVSPCGICRELISDYGKGTNVILKNKEGYIKTVISDLLPNKYIREDN

SEQ ID NO: 180 - protein, 156 aa, synthetic construct
  REGION 1..156: note = pYY-BEM4.71; tr|A0A1W5ZQK9|A0A1W5ZQK9_9BACI polypeptide sequence
MNRFMERAVSLAAENVRVGGQPFGAVLVKDDELVAEGVNEMHLNYDVSGHAELLAIRRAQGELQTHDLSGYTMYASGEPCPMCLSAMYFAGIKDVFYCATVEEAAQVGLEKSKNVYDDLQKSKGERSLVMKQMPLEDDQEDPMKLWDERTNHNGTS

SEQ ID NO: 181 - protein, 340 aa, synthetic construct
  REGION 1..340: note = pYY-BEM4.72; tr|A0A378V0W4|A0A378V0W4_MYCFO polypeptide sequence
MVHAQFDPTARQALAATAVEAKTRKDLTWQQIADAAELSPAFVTAAVLGQHALPARSAEAVAALLGLDDDAALLLQTIPIRGSIPGGIPTDPTIYRFYEMLQVYGTTLKALVHEQFGDGIISAINFKLDVRKVADPEGGERAVITLDGKYLPPNPFDRVRYRGGLMDFAQRTIDIARQNVAEGGRPFATVIVKNGEILAESPNLVAQTHDPTAHAEILAIRKACTRIGTEHLIGATIYVLAQPCPMCLGSLYYCSPDEVVFLTTRDAYEPHYVDDRKYFELNMFYDEFAKPWDQRRLPMRYEPRDAAVDVYKLWQERNGGERRVPGAPTSTRPGKNPRGE

SEQ ID NO: 182 - protein, 157 aa, synthetic construct
  REGION 1..157: note = pYY-BEM4.73; tr|I3XF03|I3XF03_RHIFR polypeptide sequence
MKQRCMSPKSAQRFWDNDMHNNKDRPMSENELFVAAREAMAKAHAPYSKFPVGAAIRAEDGQIYTGANIENLSFPEGWCAETTAISHMVMAGQRKIMEVAVIAEKLALCPPCGGCRQRLAEFSGASTRIYLCDETGIKKSLALSDLLPHSFETEILG

SEQ ID NO: 183 - protein, 595 aa, synthetic construct
  REGION 1..595: note = pYY-BEM4.74; tr|F8IEF3|F8IEF3_ALIAT polypeptide sequence
MDAKELETRGWLCMRAVDVIDKKRRGEALAEEELRFLIEGYVAGRIPDYQMSAFLMAVVWRGMTREETLVLTRLLADSGERLDLSGIPGVKVDKHSTGGVGDKATLVVLPLVASIGVPVIKMSGRGLGHTGGTIDKLESIPGFRTDLSVAELVAQVRQVGIALGGQTADLAPADKKLYALRDVTGTVESLPLIASSVMSKKLAGGADAIVLDVKVGDGAFMKSRSDARRLARLMVEIGEAAGRRTVAVLSNMDQPLGCAIGNALEVAEAIRVLSGEGPFDLAEIALALAEEMTVLAGVAATREEARRMLRQSVAEGRALETLRRWIAAQGGDPAVVDDPSRLPQAPVQMPYLPKKAGFVAKLSALAFGLAAMRLGAGRETKEEAIDPSVGIVLHAKVGDRVQTHRPMFTVHARTGEDALRCIQELEAAIQISDDPVEAPPLILARIDRSEALPYADLMDAAREARDRAYVPYSGFAVGAALELADGRMVTGANVENASYGLTNCAERSAVFRAVAEGGPGTKPEIRAVAVIADSPEPVSPCGACRQVLAEFCSPDTPVYLGNLQGDVRETTVGALLPGAFTDAQMANVRRQDKEA

SEQ ID NO: 184 - protein, 153 aa, synthetic construct
  REGION 1..153: note = pYY-BEM4.75; tr|A0A1G3M638|A0A1G3M638_9SPIR polypeptide sequence
MKTTNINALDKWDLRFLQMAEHVAEWSKDPSTKVGAVIVRPDRTIASVGFNGFARGVRDTVERLWNRELKYPLTVHAELNAILSAHEPVRGHSLYVSPLSPCSNCAGVIIQSGIARVVAKCGQVNNPAQWSESFNLALTAFAEAGVSVILVEH

SEQ ID NO: 185 - protein, 177 aa, synthetic construct
  REGION 1..177: note = pYY-BEM4.76; tr|A0A3D9LFR2|A0A3D9LFR2_9MICC polypeptide sequence
MEQNDHGSSGAFSDPFEDDIPLTASLPRITGTGSGIDWQRLESTARAAMTRAYVPYSRFPVGAAALVEDGRVVAGCNIENASLGLTLCAECSLVSNLQMSGGGRIVAFYCVDGNGEVLMPCGRCRQLLYEFHAPGMRLMGPDGELTMDEVLPLAFGPADMTHLSDSAASTDDPGRTR

SEQ ID NO: 186 - protein, 172 aa, synthetic construct
  REGION 1..172: note = pYY-BEM4.77; tr|A0A3B9YGB5|A0A3B9YGB5_9BACT polypeptide sequence
MAKPISKKYRKLIETAKAARKKAYSPYSRYQVGAAVLTESGRIYSGANMENASYGLCMCAERVAIANAVTRGEKVLQAVCVVGKKARPCGACRQVMLEFSTKETELLMVDIDPNARRDTVIRTRVYSMLPNPFDPFESGMLPQHPQNLLRRRKSPQPRRKRRSRPVHREVSR

SEQ ID NO: 187 - protein, 391 aa, synthetic construct
  REGION 1..391: note = pYY-BEM4.78; tr|A0A182F569|A0A182F569_ANOAL polypeptide sequence
MPRPSQFRVSSSQSLSNSQIQASQSSDSVVDITSYVNAVVKALLNLSCTKTIIKRADLVNIALKGNGRLIGRVLQDANIELKEIYGYELIEVEKSKTMILCSTLAAGSMDELNDANRRRYTFLYLILGYIFMKNGSVPETIVWEFLETLGIEEQQEHNYFGDVRKLYDSLFKQAYLTRTKQALEGLNDDVMLISWGVRSKHEVSKKDILAGFCKVMNRDPVDFKAQYIEANEKDDKMNNNINGTVDGRNTVEYSSLDASVKELIEAAIKVRNNAYCPYSNFAVGAALRTVGGDIVTGCNVENGTFGPSVCAERTAVCKAVSEGHREFTAVAVVAFQETEFTAPCGTCRQTLSEFSRKDIPIYLVKPSPVRVMVTSLFQLLPHAFSPSFLNK

SEQ ID NO: 188 - protein, 151 aa, synthetic construct
  REGION 1..151: note = pYY-BEM4.79; tr|A0A264Z0D4|A0A264Z0D4_9BACI polypeptide sequence
MEPKKLIEEAIVASKQAYVQYSNFHVGAALLTKDGKLYHGCNIENASYGLTNCAERTAIFKAVSEGEKEFQAIAVVGDTEGPISPCGACRQVLAEFFSPDTVVILANLKGDHVVTNINELLPGFFSSKDLQKKVKNCFEKNALGSSCLRPI

SEQ ID NO: 189 - protein, 229 aa, synthetic construct
  REGION 1..229: note = pYY-BEM4.80; tr|A0A1L9Q1R3|A0A1L9Q1R3_ASPVE polypeptide sequence
MPLSAEEAALVETATATINSIPLSEDYSVASAAKASDGRVFTGVNVYHFTGGPCAELVVLGVAAAAGAAQLTHIVAVANEQRGILSPCGRCRQVLLDLQPNIQVIVGKEGSEQSVPVAQLLPFSYRQPDQHTPVIFKALTSSGPVVVDFFATWCGPCKAVAPVVGKLSETYTDVRFIQVDVDKARSISQEHDIRAMPTFVLYKDGKLLDKRVVGGNMKELEEQIKAIIA

SEQ ID NO: 190 - protein, 18 aa, synthetic construct
  REGION 1..18: note = synthetic peptide
KRTADGSEFESPKKKRKV

SEQ ID NO: 191 - protein, 16 aa, synthetic construct
  REGION 1..16: note = synthetic peptide
KRPAATKKAGQAKKKK

SEQ ID NO: 192 - protein, 17 aa, synthetic construct
  REGION 1..17: note = synthetic peptide
KKTELQTTNAENKTKKL

SEQ ID NO: 193 - protein, 19 aa, synthetic construct
  REGION 1..19: note = synthetic peptide
KRGINDRNFWRGENGRKTR

SEQ ID NO: 194 - protein, 16 aa, synthetic construct
  REGION 1..16: note = synthetic peptide
RKSGKIAAIVVKRPRK

SEQ ID NO: 195 - protein, 7 aa, synthetic construct
  REGION 1..7: note = synthetic peptide
PKKKRKV

SEQ ID NO: 196 - protein, 30 aa, synthetic construct
  REGION 1..30: note = synthetic polypeptide
MDSLLMNRRKFLYQFKNVRWAKGRRETYLC

SEQ ID NO: 197 - protein, 1368 aa, Streptococcus pyogenes [sequence omitted]

SEQ ID NO: 198 - DNA, 4104 bp, Streptococcus pyogenes
  misc_feature 1..4104: note = wild type spCas9 polynucleotide sequence
  source 1..4104: mol_type = genomic DNA
atggataagaaatactcaataggcttagatatcggcacaaatagcgtcggatgggcggtgatcactgatgattataaggttccgtctaaaaagttcaaggttctgggaaatacagaccgccacagtatcaaaaaaaatcttataggggctcttttatttggcagtggagagacagcggaagcgactcgtctcaaacggacagctcgtagaaggtatacacgtcggaagaatcgtatttgttatctacaggagattttttcaaatgagatggcgaaagtagatgatagtttctttcatcgacttgaagagtcttttttggtggaagaagacaagaagcatgaacgtcatcctatttttggaaatatagtagatgaagttgcttatcatgagaaatatccaactatctatcatctgcgaaaaaaattggcagattctactgataaagcggatttgcgcttaatctatttggccttagcgcatatgattaagtttcgtggtcattttttgattgagggagatttaaatcctgataatagtgatgtggacaaactatttatccagttggtacaaatctacaatcaattatttgaagaaaaccctattaacgcaagtagagtagatgctaaagcgattctttctgcacgattgagtaaatcaagacgattagaaaatctcattgctcagctccccggtgagaagagaaatggcttgtttgggaatctcattgctttgtcattgggattgacccctaattttaaatcaaattttgatttggcagaagatgctaaattacagctttcaaaagatacttacgatgatgatttagataatttattggcgcaaattggagatcaatatgctgatttgtttttggcagctaagaatttatcagatgctattttactttcagatatcctaagagtaaatagtgaaataactaaggctcccctatcagcttcaatgattaagcgctacgatgaacatcatcaagacttgactcttttaaaagctttagttcgacaacaacttccagaaaagtataaagaaatcttttttgatcaatcaaaaaacggatatgcaggttatattgatgggggagctagccaagaagaattttataaatttatcaaaccaattttagaaaaaatggatggtactgaggaattattggtgaaactaaatcgtgaagatttgctgcgcaagcaacggacctttgacaacggctctattccccatcaaattcacttgggtgagctgcatgctattttgagaagacaagaagacttttatccatttttaaaagacaatcgtgagaagattgaaaaaatcttgacttttcgaattccttattatgttggtccattggcgcgtggcaatagtcgttttgcatggatgactcggaagtctgaagaaacaattaccccatggaattttgaagaagttgtcgataaaggtgcttcagctcaatcatttattgaacgcatgacaaactttgataaaaatcttccaaatgaaaaagtactaccaaaacatagtttgctttatgagtattttacggtttataacgaattgacaaaggtcaaatatgttactgagggaatgcgaaaaccagcatttctttcaggtgaacagaagaaagccattgttgatttactcttcaaaacaaatcgaaaagtaaccgttaagcaattaaaagaagattatttcaaaaaaatagaatgttttgatagtgttgaaatttcaggagttgaagatagatttaatgcttcattaggcgcctaccatgatttgctaaaaattattaaagataaagattttttggataatgaagaaaatgaagatatcttagaggatattgttttaacattgaccttatttgaagatagggggatgattgaggaaagacttaaaacatatgctcacctctttgatgataaggtgatgaaacagcttaaacgtcgccgttatactggttggggacgtttgtctcgaaaattgattaatggtattagggataagcaatctggcaaaacaatattagattttttgaaatcagatggttttgccaatcgcaattttatgcagctgatccatgatgatagtttgacatttaaagaagatattcaaaaagcacaggtgtctggacaaggccatagtttacatgaacagattgctaacttagctggcagtcctgctattaaaaaaggtattttacagactgtaaaaattgttgatgaactggtcaaagtaatggggcataagccagaaaatatcgttattgaaatggcacgtgaaaatcagacaactcaaaagggccagaaaaattcgcgagagcgtatgaaacgaatcgaagaaggtatcaaagaattaggaagtcagattcttaaagagcatcctgttgaaaatactcaattgcaaaatgaaaagctctatctctattatctacaaaatggaagagacatgtatgtggaccaagaattagatattaatcgtttaagtgattatgatgtcgatcacattgttccacaaagtttcattaaagacgattcaatagacaataaggtactaacgcgttctgataaaaatcgtggtaaatcggataacgttccaagtgaagaagtagtcaaaaagatgaaaaactattggagacaacttctaaacgccaagttaatcactcaacgtaagtttgataatttaacgaaagctgaacgtggaggtttgagtgaacttgataaagctggttttatcaaacgccaattggttgaaactcgccaaatcactaagcatgtggcacaaattttggatagtcgcatgaatactaaatacgatgaaaatgataaacttattcgagaggttaaagtgattaccttaaaatctaaattagtttctgacttccgaaaagatttccaattctataaagtacgtgagattaacaattaccatcatgcccatgatgcgtatctaaatgccgtcgttggaactgctttgattaagaaatatccaaaacttgaatcggagtttgtctatggtgattataaagtttatgatgttcgtaaaatgattgctaagtctgagcaagaaataggcaaagcaaccgcaaaatatttcttttactctaatatcatgaacttcttcaaaacagaaattacacttgcaaatggagagattcgcaaacgccctctaatcgaaactaatggggaaactggagaaattgtctgggataaagggcgagattttgccacagtgcgcaaagtattgtccatgccccaagtcaatattgtcaagaaaacagaagtacagacaggcggattctccaaggagtcaattttaccaaaaagaaattcggacaagcttattgctcgtaaaaaagactgggatccaaaaaaatatggtggttttgatagtccaacggtagcttattcagtcctagtggttgctaaggtggaaaaagggaaatcgaagaagttaaaatccgttaaagagttactagggatcacaattatggaaagaagttcctttgaaaaaaatccgattgactttttagaagctaaaggatataaggaagttaaaaaagacttaatcattaaactacctaaatatagtctttttgagttagaaaacggtcgtaaacggatgctggctagtgccggagaattacaaaaaggaaatgagctggctctgccaagcaaatatgtgaattttttatatttagctagtcattatgaaaagttgaagggtagtccagaagataacgaacaaaaacaattgtttgtggagcagcataagcattatttagatgagattattgagcaaatcagtgaattttctaagcgtgttattttagcagatgccaatttagataaagttcttagtgcatataacaaacatagagacaaaccaatacgtgaacaagcagaaaatattattcatttatttacgttgacgaatcttggagctcccgctgcttttaaatattttgatacaacaattgatcgtaaacgatatacgtctacaaaagaagttttagatgccactcttatccatcaatccatcactggtctttatgaaacacgcattgatttgagtcagctaggaggtgactga

SEQ ID NO: 199 - protein, 1367 aa, Streptococcus pyogenes
  REGION 1..1367: note = MISC_FEATURE - spCas9 polypeptide sequence
MDKKYSIGLDIGTNSVGWAVITDDYKVPSKKFKVLGNTDRHSIKKNLIGALLFGSGETAEATRLKRTARRRYTRRKNRICYLQEIFSNEMAKVDDSFFHRLEESFLVEEDKKHERHPIFGNIVDEVAYHEKYPTIYHLRKKLADSTDKADLRLIYLALAHMIKFRGHFLIEGDLNPDNSDVDKLFIQLVQIYNQLFEENPINASRVDAKAILSARLSKSRRLENLIAQLPGEKRNGLFGNLIALSLGLTPNFKSNFDLAEDAKLQLSKDTYDDDLDNLLAQIGDQYADLFLAAKNLSDAILLSDILRVNSEITKAPLSASMIKRYDEHHQDLTLLKALVRQQLPEKYKEIFFDQSKNGYAGYIDGGASQEEFYKFIKPILEKMDGTEELLVKLNREDLLRKQRTFDNGSIPHQIHLGELHAILRRQEDFYPFLKDNREKIEKILTFRIPYYVGPLARGNSRFAWMTRKSEETITPWNFEEVVDKGASAQSFIERMTNFDKNLPNEKVLPKHSLLYEYFTVYNELTKVKYVTEGMRKPAFLSGEQKKAIVDLLFKTNRKVTVKQLKEDYFKKIECFDSVEISGVEDRFNASLGAYHDLLKIIKDKDFLDNEENEDILEDIVLTLTLFEDRGMIEERLKTYAHLFDDKVMKQLKRRRYTGWGRLSRKLINGIRDKQSGKTILDFLKSDGFANRNFMQLIHDDSLTFKEDIQKAQVSGQGHSLHEQIANLAGSPAIKKGILQTVKIVDELVKVMGHKPENIVIEMARENQTTQKGQKNSRERMKRIEEGIKELGSQILKEHPVENTQLQNEKLYLYYLQNGRDMYVDQELDINRLSDYDVDHIVPQSFIKDDSIDNKVLTRSDKNRGKSDNVPSEEVVKKMKNYWRQLLNAKLITQRKFDNLTKAERGGLSELDKAGFIKRQLVETRQITKHVAQILDSRMNTKYDENDKLIREVKVITLKSKLVSDFRKDFQFYKVREINNYHHAHDAYLNAVVGTALIKKYPKLESEFVYGDYKVYDVRKMIAKSEQEIGKATAKYFFYSNIMNFFKTEITLANGEIRKRPLIETNGETGEIVWDKGRDFATVRKVLSMPQVNIVKKTEVQTGGFSKESILPKRNSDKLIARKKDWDPKKYGGFDSPTVAYSVLVVAKVEKGKSKKLKSVKELLGITIMERSSFEKNPIDFLEAKGYKEVKKDLIIKLPKYSLFELENGRKRMLASAGELQKGNELALPSKYVNFLYLASHYEKLKGSPEDNEQKQLFVEQHKHYLDEIIEQISEFSKRVILADANLDKVLSAYNKHRDKPIREQAENIIHLFTLTNLGAPAAFKYFDTTIDRKRYTSTKEVLDATLIHQSITGLYETRIDLSQLGGD

SEQ ID NO: 200 - DNA, 4212 bp, synthetic construct
  misc_feature 1..4212: note = wild-type Cas9 polynucleotide sequence
  misc_feature 5..58: note = RuvC domain
  misc_feature 718..764: note = RuvC domain
  misc_feature 772..901: note = HNH domain
  misc_feature 906..1101: note = RuvC domain
  source 1..4212: mol_type = other DNA
atggataaaaagtattctattggtttagacatcggcactaattccgttggatgggctgtcataaccgatgaatacaaagtaccttcaaagaaatttaaggtgttggggaacacagaccgtcattcgattaaaaagaatcttatcggtgccctcctattcgatagtggcgaaacggcagaggcgactcgcctgaaacgaaccgctcggagaaggtatacacgtcgcaagaaccgaatatgttacttacaagaaatttttagcaatgagatggccaaagttgacgattctttctttcaccgtttggaagagtccttccttgtcgaagaggacaagaaacatgaacggcaccccatctttggaaacatagtagatgaggtggcatatcatgaaaagtacccaacgatttatcacctcagaaaaaagctagttgactcaactgataaagcggacctgaggttaatctacttggctcttgcccatatgataaagttccgtgggcactttctcattgagggtgatctaaatccggacaactcggatgtcgacaaactgttcatccagttagtacaaacctataatcagttgtttgaagagaaccctataaatgcaagtggcgtggatgcgaaggctattcttagcgcccgcctctctaaatcccgacggctagaaaacctgatcgcacaattacccggagagaagaaaaatgggttgttcggtaaccttatagcgctctcactaggcctgacaccaaattttaagtcgaacttcgacttagctgaagatgccaaattgcagcttagtaaggacacgtacgatgacgatctcgacaatctactggcacaaattggagatcagtatgcggacttatttttggctgccaaaaaccttagcgatgcaatcctcctatctgacatactgagagttaatactgagattaccaaggcgccgttatccgcttcaatgatcaaaaggtacgatgaacatcaccaagacttgacacttctcaaggccctagtccgtcagcaactgcctgagaaatataaggaaatattctttgatcagtcgaaaaacgggtacgcaggttatattgacggcggagcgagtcaagaggaattctacaagtttatcaaacccatattagagaagatggatgggacggaagagttgcttgtaaaactcaatcgcgaagatctactgcgaaagcagcggactttcgacaacggtagcattccacatcaaatccacttaggcgaattgcatgctatacttagaaggcaggaggatttttatccgttcctcaaagacaatcgtgaaaagattgagaaaatcctaacctttcgcataccttactatgtgggacccctggcccgagggaactctcggttcgcatggatgacaagaaagtccgaagaaacgattactccatggaattttgaggaagttgtcgataaaggtgcgtcagctcaatcgttcatcgagaggatgaccaactttgacaagaatttaccgaacgaaaaagtattgcctaagcacagtttactttacgagtatttcacagtgtacaatgaactcacgaaagttaagtatgtcactgagggcatgcgtaaacccgcctttctaagcggagaacagaagaaagcaatagtagatctgttattcaagaccaaccgcaaagtgacagttaagcaattgaaagaggactactttaagaaaattgaatgcttcgattctgtcgagatctccggggtagaagatcgatttaatgcgtcacttggtacgtatcatgacctcctaaagataattaaagataaggacttcctggataacgaagagaatgaagatatcttagaagatatagtgttgactcttaccctctttgaagatcgggaaatgattgaggaaagactaaaaacatacgctcacctgttcgacgataaggttatgaaacagttaaagaggcgtcgctatacgggctggggacgattgtcgcggaaacttatcaacgggataagagacaagcaaagtggtaaaactattctcgattttctaaagagcgacggcttcgccaataggaactttatgcagctgatccatgatgactctttaaccttcaaagaggatatacaaaaggcacaggtttccggacaaggggactcattgcacgaacatattgcgaatcttgctggttcgccagccatcaaaaagggcatactccagacagtcaaagtagtggatgagctagttaaggtcatgggacgtcacaaaccggaaaacattgtaatcgagatggcacgcgaaaatcaaacgactcagaaggggcaaaaaaacagtcgagagcggatgaagagaatagaagagggtattaaagaactgggcagccagatcttaaaggagcatcctgtggaaaatacccaattgcagaacgagaaactttacctctattacctacaaaatggaagggacatgtatgttgatcaggaactggacataaaccgtttatctgattacgacgtcgatcacattgtaccccaatcctttttgaaggacgattcaatcgacaataaagtgcttacacgctcggataagaaccgagggaaaagtgacaatgttccaagcgaggaagtcgtaaagaaaatgaagaactattggcggcagctcctaaatgcgaaactgataacgcaaagaaagttcgataacttaactaaagctgagaggggtggcttgtctgaacttgacaaggccggatttattaaacgtcagctcgtggaaacccgccaaatcacaaagcatgttgcacagatactagattcccgaatgaatacgaaatacgacgagaacgataagctgattcgggaagtcaaagtaatcactttaaagtcaaaattggtgtcggacttcagaaaggattttcaattctataaagttagggagataaataactaccaccatgcgcacgacgcttatcttaatgccgtcgtagggaccgcactcattaagaaatacccgaagctagaaagtgagtttgtgtatggtgattacaaagtttatgacgtccgtaagatgatcgcgaaaagcgaacaggagataggcaaggctacagccaaatacttcttttattctaacattatgaatttctttaagacggaaatcactctggcaaacggagagatacgcaaacgacctttaattgaaaccaatggggagacaggtgaaatcgtatgggataagggccgggacttcgcgacggtgagaaaagttttgtccatgccccaagtcaacatagtaaagaaaactgaggtgcagaccggagggttttcaaaggaatcgattcttccaaaaaggaatagtgataagctcatcgctcgtaaaaaggactgggacccgaaaaagtacggtggcttcgatagccctacagttgcctattctgtcctagtagtggcaaaagttgagaagggaaaatccaagaaactgaagtcagtcaaagaattattggggataacgattatggagcgctcgtcttttgaaaagaaccccatcgacttccttgaggcgaaaggttacaaggaagtaaaaaaggatctcataattaaactaccaaagtatagtctgtttgagttagaaaatggccgaaaacggatgttggctagcgccggagagcttcaaaaggggaacgaactcgcactaccgtctaaatacgtgaatttcctgtatttagcgtcccattacgagaagttgaaaggttcacctgaagataacgaacagaagcaactttttgttgagcagcacaaacattatctcgacgaaatcatagagcaaatttcggaattcagtaagagagtcatcctagctgatgccaatctggacaaagtattaagcgcatacaacaagcacagggataaacccatacgtgagcaggcggaaaatattatccatttgtttactcttaccaacctcggcgctccagccgcattcaagtattttgacacaacgatagatcgcaaacgatacacttctaccaaggaggtgctagacgcgacactgattcaccaatccatcacgggattatatgaaactcggatagatttgtcacagcttgggggtgacggatcccccaagaagaagaggaaagtctcgagcgactacaaagaccatgacggtgattataaagatcatgacatcgattacaaggatgacgatgacaaggctgcagga

SEQ ID NO: 201 - protein, 1368 aa, synthetic construct
  REGION 1..1368: note = exemplary catalytically active Cas9 nickase (nCas9) polypeptide sequence
MDKKYSIGLAIGTNSVGWAVITDEYKVPSKKFKVLGNTDRHSIKKNLIGALLFDSGETAEATRLKRTARRRYTRRKNRICYLQEIFSNEMAKVDDSFFHRLEESFLVEEDKKHERHPIFGNIVDEVAYHEKYPTIYHLRKKLVDSTDKADLRLIYLALAHMIKFRGHFLIEGDLNPDNSDVDKLFIQLVQTYNQLFEENPINASGVDAKAILSARLSKSRRLENLIAQLPGEKKNGLFGNLIALSLGLTPNFKSNFDLAEDAKLQLSKDTYDDDLDNLLAQIGDQYADLFLAAKNLSDAILLSDILRVNTEITKAPLSASMIKRYDEHHQDLTLLKALVRQQLPEKYKEIFFDQSKNGYAGYIDGGASQEEFYKFIKPILEKMDGTEELLVKLNREDLLRKQRTFDNGSIPHQIHLGELHAILRRQEDFYPFLKDNREKIEKILTFRIPYYVGPLARGNSRFAWMTRKSEETITPWNFEEVVDKGASAQSFIERMTNFDKNLPNEKVLPKHSLLYEYFTVYNELTKVKYVTEGMRKPAFLSGEQKKAIVDLLFKTNRKVTVKQLKEDYFKKIECFDSVEISGVEDRFNASLGTYHDLLKIIKDKDFLDNEENEDILEDIVLTLTLFEDREMIEERLKTYAHLFDDKVMKQLKRRRYTGWGRLSRKLINGIRDKQSGKTILDFLKSDGFANRNFMQLIHDDSLTFKEDIQKAQVSGQGDSLHEHIANLAGSPAIKKGILQTVKVVDELVKVMGRHKPENIVIEMARENQTTQKGQKNSRERMKRIEEGIKELGSQILKEHPVENTQLQNEKLYLYYLQNGRDMYVDQELDINRLSDYDVDHIVPQSFLKDDSIDNKVLTRSDKNRGKSDNVPSEEVVKKMKNYWRQLLNAKLITQRKFDNLTKAERGGLSELDKAGFIKRQLVETRQITKHVAQILDSRMNTKYDENDKLIREVKVITLKSKLVSDFRKDFQFYKVREINNYHHAHDAYLNAVVGTALIKKYPKLESEFVYGDYKVYDVRKMIAKSEQEIGKATAKYFFYSNIMNFFKTEITLANGEIRKRPLIETNGETGEIVWDKGRDFATVRKVLSMPQVNIVKKTEVQTGGFSKESILPKRNSDKLIARKKDWDPKKYGGFDSPTVAYSVLVVAKVEKGKSKKLKSVKELLGITIMERSSFEKNPIDFLEAKGYKEVKKDLIIKLPKYSLFELENGRKRMLASAGELQKGNELALPSKYVNFLYLASHYEKLKGSPEDNEQKQLFVEQHKHYLDEIIEQISEFSKRVILADANLDKVLSAYNKHRDKPIREQAENIIHLFTLTNLGAPAAFKYFDTTIDRKRYTSTKEVLDATLIHQSITGLYETRIDLSQLGGD

SEQ ID NO: 202 - DNA, 4107 bp, Streptococcus pyogenes
  misc_feature 1..4107: note = Cas9 from Streptococcus pyogenes (NCBI Ref. Seq.: NC_002737.2)polynucleotide sequence
  source 1..4107: mol_type = genomic DNA
atggataagaaatactcaataggcttagatatcggcacaaatagcgtcggatgggcggtgatcactgatgaatataaggttccgtctaaaaagttcaaggttctgggaaatacagaccgccacagtatcaaaaaaaatcttataggggctcttttatttgacagtggagagacagcggaagcgactcgtctcaaacggacagctcgtagaaggtatacacgtcggaagaatcgtatttgttatctacaggagattttttcaaatgagatggcgaaagtagatgatagtttctttcatcgacttgaagagtcttttttggtggaagaagacaagaagcatgaacgtcatcctatttttggaaatatagtagatgaagttgcttatcatgagaaatatccaactatctatcatctgcgaaaaaaattggtagattctactgataaagcggatttgcgcttaatctatttggccttagcgcatatgattaagtttcgtggtcattttttgattgagggagatttaaatcctgataatagtgatgtggacaaactatttatccagttggtacaaacctacaatcaattatttgaagaaaaccctattaacgcaagtggagtagatgctaaagcgattctttctgcacgattgagtaaatcaagacgattagaaaatctcattgctcagctccccggtgagaagaaaaatggcttatttgggaatctcattgctttgtcattgggtttgacccctaattttaaatcaaattttgatttggcagaagatgctaaattacagctttcaaaagatacttacgatgatgatttagataatttattggcgcaaattggagatcaatatgctgatttgtttttggcagctaagaatttatcagatgctattttactttcagatatcctaagagtaaatactgaaataactaaggctcccctatcagcttcaatgattaaacgctacgatgaacatcatcaagacttgactcttttaaaagctttagttcgacaacaacttccagaaaagtataaagaaatcttttttgatcaatcaaaaaacggatatgcaggttatattgatgggggagctagccaagaagaattttataaatttatcaaaccaattttagaaaaaatggatggtactgaggaattattggtgaaactaaatcgtgaagatttgctgcgcaagcaacggacctttgacaacggctctattccccatcaaattcacttgggtgagctgcatgctattttgagaagacaagaagacttttatccatttttaaaagacaatcgtgagaagattgaaaaaatcttgacttttcgaattccttattatgttggtccattggcgcgtggcaatagtcgttttgcatggatgactcggaagtctgaagaaacaattaccccatggaattttgaagaagttgtcgataaaggtgcttcagctcaatcatttattgaacgcatgacaaactttgataaaaatcttccaaatgaaaaagtactaccaaaacatagtttgctttatgagtattttacggtttataacgaattgacaaaggtcaaatatgttactgaaggaatgcgaaaaccagcatttctttcaggtgaacagaagaaagccattgttgatttactcttcaaaacaaatcgaaaagtaaccgttaagcaattaaaagaagattatttcaaaaaaatagaatgttttgatagtgttgaaatttcaggagttgaagatagatttaatgcttcattaggtacctaccatgatttgctaaaaattattaaagataaagattttttggataatgaagaaaatgaagatatcttagaggatattgttttaacattgaccttatttgaagatagggagatgattgaggaaagacttaaaacatatgctcacctctttgatgataaggtgatgaaacagcttaaacgtcgccgttatactggttggggacgtttgtctcgaaaattgattaatggtattagggataagcaatctggcaaaacaatattagattttttgaaatcagatggttttgccaatcgcaattttatgcagctgatccatgatgatagtttgacatttaaagaagacattcaaaaagcacaagtgtctggacaaggcgatagtttacatgaacatattgcaaatttagctggtagccctgctattaaaaaaggtattttacagactgtaaaagttgttgatgaattggtcaaagtaatggggcggcataagccagaaaatatcgttattgaaatggcacgtgaaaatcagacaactcaaaagggccagaaaaattcgcgagagcgtatgaaacgaatcgaagaaggtatcaaagaattaggaagtcagattcttaaagagcatcctgttgaaaatactcaattgcaaaatgaaaagctctatctctattatctccaaaatggaagagacatgtatgtggaccaagaattagatattaatcgtttaagtgattatgatgtcgatcacattgttccacaaagtttccttaaagacgattcaatagacaataaggtcttaacgcgttctgataaaaatcgtggtaaatcggataacgttccaagtgaagaagtagtcaaaaagatgaaaaactattggagacaacttctaaacgccaagttaatcactcaacgtaagtttgataatttaacgaaagctgaacgtggaggtttgagtgaacttgataaagctggttttatcaaacgccaattggttgaaactcgccaaatcactaagcatgtggcacaaattttggatagtcgcatgaatactaaatacgatgaaaatgataaacttattcgagaggttaaagtgattaccttaaaatctaaattagtttctgacttccgaaaagatttccaattctataaagtacgtgagattaacaattaccatcatgcccatgatgcgtatctaaatgccgtcgttggaactgctttgattaagaaatatccaaaacttgaatcggagtttgtctatggtgattataaagtttatgatgttcgtaaaatgattgctaagtctgagcaagaaataggcaaagcaaccgcaaaatatttcttttactctaatatcatgaacttcttcaaaacagaaattacacttgcaaatggagagattcgcaaacgccctctaatcgaaactaatggggaaactggagaaattgtctgggataaagggcgagattttgccacagtgcgcaaagtattgtccatgccccaagtcaatattgtcaagaaaacagaagtacagacaggcggattctccaaggagtcaattttaccaaaaagaaattcggacaagcttattgctcgtaaaaaagactgggatccaaaaaaatatggtggttttgatagtccaacggtagcttattcagtcctagtggttgctaaggtggaaaaagggaaatcgaagaagttaaaatccgttaaagagttactagggatcacaattatggaaagaagttcctttgaaaaaaatccgattgactttttagaagctaaaggatataaggaagttaaaaaagacttaatcattaaactacctaaatatagtctttttgagttagaaaacggtcgtaaacggatgctggctagtgccggagaattacaaaaaggaaatgagctggctctgccaagcaaatatgtgaattttttatatttagctagtcattatgaaaagttgaagggtagtccagaagataacgaacaaaaacaattgtttgtggagcagcataagcattatttagatgagattattgagcaaatcagtgaattttctaagcgtgttattttagcagatgccaatttagataaagttcttagtgcatataacaaacatagagacaaaccaatacgtgaacaagcagaaaatattattcatttatttacgttgacgaatcttggagctcccgctgcttttaaatattttgatacaacaattgatcgtaaacgatatacgtctacaaaagaagttttagatgccactcttatccatcaatccatcactggtctttatgaaacacgcattgatttgagtcagctaggaggtgactga

SEQ ID NO: 203 - protein, 1368 aa, synthetic construct
  REGION 1..1368: note = catalytically inactive Cas9 (dCas9)polypeptide sequence
  REGION 5..58: note = MISC_FEATURE - RuvC domain
  REGION 718..764: note = MISC_FEATURE - RuvC domain
  REGION 773..902: note = MISC_FEATURE - HNH domain
  REGION 907..1102: note = MISC_FEATURE - RuvC domain
MDKKYSIGLAIGTNSVGWAVITDEYKVPSKKFKVLGNTDRHSIKKNLIGALLFDSGETAEATRLKRTARRRYTRRKNRICYLQEIFSNEMAKVDDSFFHRLEESFLVEEDKKHERHPIFGNIVDEVAYHEKYPTIYHLRKKLVDSTDKADLRLIYLALAHMIKFRGHFLIEGDLNPDNSDVDKLFIQLVQTYNQLFEENPINASGVDAKAILSARLSKSRRLENLIAQLPGEKKNGLFGNLIALSLGLTPNFKSNFDLAEDAKLQLSKDTYDDDLDNLLAQIGDQYADLFLAAKNLSDAILLSDILRVNTEITKAPLSASMIKRYDEHHQDLTLLKALVRQQLPEKYKEIFFDQSKNGYAGYIDGGASQEEFYKFIKPILEKMDGTEELLVKLNREDLLRKQRTFDNGSIPHQIHLGELHAILRRQEDFYPFLKDNREKIEKILTFRIPYYVGPLARGNSRFAWMTRKSEETITPWNFEEVVDKGASAQSFIERMTNFDKNLPNEKVLPKHSLLYEYFTVYNELTKVKYVTEGMRKPAFLSGEQKKAIVDLLFKTNRKVTVKQLKEDYFKKIECFDSVEISGVEDRFNASLGTYHDLLKIIKDKDFLDNEENEDILEDIVLTLTLFEDREMIEERLKTYAHLFDDKVMKQLKRRRYTGWGRLSRKLINGIRDKQSGKTILDFLKSDGFANRNFMQLIHDDSLTFKEDIQKAQVSGQGDSLHEHIANLAGSPAIKKGILQTVKVVDELVKVMGRHKPENIVIEMARENQTTQKGQKNSRERMKRIEEGIKELGSQILKEHPVENTQLQNEKLYLYYLQNGRDMYVDQELDINRLSDYDVDAIVPQSFLKDDSIDNKVLTRSDKNRGKSDNVPSEEVVKKMKNYWRQLLNAKLITQRKFDNLTKAERGGLSELDKAGFIKRQLVETRQITKHVAQILDSRMNTKYDENDKLIREVKVITLKSKLVSDFRKDFQFYKVREINNYHHAHDAYLNAVVGTALIKKYPKLESEFVYGDYKVYDVRKMIAKSEQEIGKATAKYFFYSNIMNFFKTEITLANGEIRKRPLIETNGETGEIVWDKGRDFATVRKVLSMPQVNIVKKTEVQTGGFSKESILPKRNSDKLIARKKDWDPKKYGGFDSPTVAYSVLVVAKVEKGKSKKLKSVKELLGITIMERSSFEKNPIDFLEAKGYKEVKKDLIIKLPKYSLFELENGRKRMLASAGELQKGNELALPSKYVNFLYLASHYEKLKGSPEDNEQKQLFVEQHKHYLDEIIEQISEFSKRVILADANLDKVLSAYNKHRDKPIREQAENIIHLFTLTNLGAPAAFKYFDTTIDRKRYTSTKEVLDATLIHQSITGLYETRIDLSQLGGD

SEQ ID NO: 204 - protein, 345 aa, Sulfolobus islandicus
  REGION 1..345: note = MISC_FEATURE - tr|F0NN87|F0NN87_SULIHCRISPR-associatedCasx protein OS =Sulfolobus islandicus (strain HVE10/4) GN = SiH_0402 PE=4; SV = 1);CasX polypeptide sequence
MEVPLYNIFGDNYIIQVATEAENSTIYNNKVEIDDEELRNVLNLAYKIAKNNEDAAAERRGKAKKKKGEEGETTTSNIILPLSGNDKNPWTETLKCYNFPTTVALSEVFKNFSQVKECEEVSAPSFVKPEFYEFGRSPGMVERTRRVKLEVEPHYLIIAAAGWVLTRLGKAKVSEGDYVGVNVFTPTRGILYSLIQNVNGIVPGIKPETAFGLWIARKVVSSVTNPNVSVVRIYTISDAVGQNPTTINGGFSIDLTKLLEKRYLLSERLEAIARNALSISSNMRERYIVLANYIYEYLTGSKRLEDLLYFANRDLIMNLNSDDGKVRDLKLISAYVNGELIRGEG

SEQ ID NO: 205 - protein, 345 aa, Sulfolobus islandicus
  REGION 1..345: note = MISC_FEATURE - tr|F0NH53|F0NH53_SULIR CRISPR associated protein, Casx OS =Sulfolobus islandicus (strain REY15A) GN=SiRe_0771 PE=4 SV=1);CasX polypeptide sequence
MEVPLYNIFGDNYIIQVATEAENSTIYNNKVEIDDEELRNVLNLAYKIAKNNEDAAAERRGKAKKKKGEEGETTTSNIILPLSGNDKNPWTETLKCYNFPTTVALSEVFKNFSQVKECEEVSAPSFVKPEFYKFGRSPGMVERTRRVKLEVEPHYLIMAAAGWVLTRLGKAKVSEGDYVGVNVFTPTRGILYSLIQNVNGIVPGIKPETAFGLWIARKVVSSVTNPNVSVVSIYTISDAVGQNPTTINGGFSIDLTKLLEKRDLLSERLEAIARNALSISSNMRERYIVLANYIYEYLTGSKRLEDLLYFANRDLIMNLNSDDGKVRDLKLISAYVNGELIRGEG

SEQ ID NO: 206 - protein, 987 aa, unidentified
  REGION 1..987: note = MISC_FEATURE - CasX polypeptide sequence
MEKRINKIRKKLSADNATKPVSRSGPMKTLLVRVMTDDLKKRLEKRRKKPEVMPQVISNNAANNLRMLLDDYTKMKEAILQVYWQEFKDDHVGLMCKFAQPASKKIDQNKLKPEMDEKGNLTTAGFACSQCGQPLFVYKLEQVSEKGKAYTNYFGRCNVAEHEKLILLAQLKPVKDSDEAVTYSLGKFGQRALDFYSIHVTKESTHPVKPLAQIAGNRYASGPVGKALSDACMGTIASFLSKYQDIIIEHQKVVKGNQKRLESLRELAGKENLEYPSVTLPPQPHTKEGVDFAYNEVIARVRMWVNLNLWQKLKLSRDDAKPLLRLKGFPSFPVVERRENEVDWWNTINEVKKLIDAKRDMGRVFWSGVTAEKRNTILEGYNYLPNENDHKKREGSLENPKKPAKRQFGDLLLYLEKKYAGDWGKVFDEAWERIDKKIAGLTSHIEREEARNAEDAQSKAVLTDWLRAKASFVLERLKEMDEKEFYACEIQLQKWYGDLRGNPFAVEAENRVVDISGFSIGSDGHSIQYRNLLAWKYLENGKREFYLLMNYGKKGRIRFTDGTDIKKSGKWQGLLYGGGKAKVIDLTFDPDDEQLIILPLAFGTRQGREFIWNDLLSLETGLIKLANGRVIEKTIYNKKIGRDEPALFVALTFERREVVDPSNIKPVNLIGVARGENIPAVIALTDPEGCPLPEFKDSSGGPTDILRIGEGYKEKQRAIQAAKEVEQRRAGGYSRKFASKSRNLADDMVRNSARDLFYHAVTHDAVLVFANLSRGFGRQGKRTFMTERQYTKMEDWLTAKLAYEGLTSKTYLSKTLAQYTSKTCSNCGFTITYADMDVMLVRLKKTSDGWATTLNNKELKAEYQITYYNRYKRQTVEKELSAELDRLSEESGNNDISKWTKGRRDEALFLLKKRFSHRPVQEQFVCLDCGHEVHAAEQAALNIARSWLFLNSNSTEFKSYKSGKQPFVGAWQAFYKRRLKEVWKPNA

SEQ ID NO: 207 - protein, 1210 aa, unidentified
  REGION 1..1210: note = MISC_FEATURE - APG80656.1 CRISPR-associated protein CasY [uncultured Parcubacteria group bacterium]; CasY polypeptide sequence
MSKRHPRISGVKGYRLHAQRLEYTGKSGAMRTIKYPLYSSPSGGRTVPREIVSAINDDYVGLYGLSNFDDLYNAEKRNEEKVYSVLDFWYDCVQYGAVFSYTAPGLLKNVAEVRGGSYELTKTLKGSHLYDELQIDKVIKFLNKKEISRANGSLDKLKKDIIDCFKAEYRERHKDQCNKLADDIKNAKKDAGASLGERQKKLFRDFFGISEQSENDKPSFTNPLNLTCCLLPFDTVNNNRNRGEVLFNKLKEYAQKLDKNEGSLEMWEYIGIGNSGTAFSNFLGEGFLGRLRENKITELKKAMMDITDAWRGQEQEEELEKRLRILAALTIKLREPKFDNHWGGYRSDINGKLSSWLQNYINQTVKIKEDLKGHKKDLKKAKEMINRFGESDTKEEAVVSSLLESIEKIVPDDSADDEKPDIPAIAIYRRFLSDGRLTLNRFVQREDVQEALIKERLEAEKKKKPKKRKKKSDAEDEKETIDFKELFPHLAKPLKLVPNFYGDSKRELYKKYKNAAIYTDALWKAVEKIYKSAFSSSLKNSFFDTDFDKDFFIKRLQKIFSVYRRFNTDKWKPIVKNSFAPYCDIVSLAENEVLYKPKQSRSRKSAAIDKNRVRLPSTENIAKAGIALARELSVAGFDWKDLLKKEEHEEYIDLIELHKTALALLLAVTETQLDISALDFVENGTVKDFMKTRDGNLVLEGRFLEMFSQSIVFSELRGLAGLMSRKEFITRSAIQTMNGKQAELLYIPHEFQSAKITTPKEMSRAFLDLAPAEFATSLEPESLSEKSLLKLKQMRYYPHYFGYELTRTGQGIDGGVAENALRLEKSPVKKREIKCKQYKTLGRGQNKIVLYVRSSYYQTQFLEWFLHRPKNVQTDVAVSGSFLIDEKKVKTRWNYDALTVALEPVSGSERVFVSQPFTIFPEKSAEEEGQRYLGIDIGEYGIAYTALEITGDSAKILDQNFISDPQLKTLREEVKGLKLDQRRGTFAMPSTKIARIRESLVHSLRNRIHHLALKHKAKIVYELEVSRFEEGKQKIKKVYATLKKADVYSEIDADKNLQTTVWGKLAVASEISASYTSQFCGACKKLWRAEMQVDETITTQELIGTVRVIKGGTLIDAIKDFMRPPIFDENDTPFPKYRDFCDKHHISKKMRGNSCLFICPFCRANADADIQASQTIALLRYVKEEKKVEDYFERFRKLKNIKVLGQMKKI

SEQ ID NO: 208 - protein, 1082 aa, Neisseria meningitidis
  REGION 1..1082: note = MISC_FEATURE - NCBI Reference: WP_002235162.1; type II CRISPR RNA-guided endonuclease Cas9; Nme1Cas9 polypeptide sequence
MAAFKPNPINYILGLDIGIASVGWAMVEIDEDENPICLIDLGVRVFERAEVPKTGDSLAMARRLARSVRRLTRRRAHRLLRARRLLKREGVLQAADFDENGLIKSLPNTPWQLRAAALDRKLTPLEWSAVLLHLIKHRGYLSQRKNEGETADKELGALLKGVADNAHALQTGDFRTPAELALNKFEKESGHIRNQRGDYSHTFSRKDLQAELILLFEKQKEFGNPHVSGGLKEGIETLLMTQRPALSGDAVQKMLGHCTFEPAEPKAAKNTYTAERFIWLTKLNNLRILEQGSERPLTDTERATLMDEPYRKSKLTYAQARKLLGLEDTAFFKGLRYGKDNAEASTLMEMKAYHAISRALEKEGLKDKKSPLNLSPELQDEIGTAFSLFKTDEDITGRLKDRIQPEILEALLKHISFDKFVQISLKALRRIVPLMEQGKRYDEACAEIYGDHYGKKNTEEKIYLPPIPADEIRNPVVLRALSQARKVINGVVRRYGSPARIHIETAREVGKSFKDRKEIEKRQEENRKDREKAAAKFREYFPNFVGEPKSKDILKLRLYEQQHGKCLYSGKEINLGRLNEKGYVEIDHALPFSRTWDDSFNNKVLVLGSENQNKGNQTPYEYFNGKDNSREWQEFKARVETSRFPRSKKQRILLQKFDEDGFKERNLNDTRYVNRFLCQFVADRMRLTGKGKKRVFASNGQITNLLRGFWGLRKVRAENDRHHALDAVVVACSTVAMQQKITRFVRYKEMNAFDGKTIDKETGEVLHQKTHFPQPWEFFAQEVMIRVFGKPDGKPEFEEADTPEKLRTLLAEKLSSRPEAVHEYVTPLFVSRAPNRKMSGQGHMETVKSAKRLDEGVSVLRVPLTQLKLKDLEKMVNREREPKLYEALKARLEAHKDDPAKAFAEPFYKYDKAGNRTQQVKAVRVEQVQKTGVWVRNHNGIADNATMVRVDVFEKGDKYYLVPIYSWQVAKGILPDRAVVQGKDEEDWQLIDDSFNFKFSLHPNDLVEVITKKARMFGYFASCHRGTGNINIRIHDLDHKIGKNGILEGIGVKTALSFQKYQIDELGKEIRPCRLKKRPPVR

SEQ ID NO: 209 - protein, 1082 aa, Neisseria meningitidis
  REGION 1..1082: note = MISC_FEATURE - NCBI Reference: WP_002230835; type II CRISPR RNA-guided endonuclease Cas9; Nme2Cas9 polypeptide sequence
MAAFKPNPINYILGLDIGIASVGWAMVEIDEEENPIRLIDLGVRVFERAEVPKTGDSLAMARRLARSVRRLTRRRAHRLLRARRLLKREGVLQAADFDENGLIKSLPNTPWQLRAAALDRKLTPLEWSAVLLHLIKHRGYLSQRKNEGETADKELGALLKGVANNAHALQTGDFRTPAELALNKFEKESGHIRNQRGDYSHTFSRKDLQAELILLFEKQKEFGNPHVSGGLKEGIETLLMTQRPALSGDAVQKMLGHCTFEPAEPKAAKNTYTAERFIWLTKLNNLRILEQGSERPLTDTERATLMDEPYRKSKLTYAQARKLLGLEDTAFFKGLRYGKDNAEASTLMEMKAYHAISRALEKEGLKDKKSPLNLSSELQDEIGTAFSLFKTDEDITGRLKDRVQPEILEALLKHISFDKFVQISLKALRRIVPLMEQGKRYDEACAEIYGDHYGKKNTEEKIYLPPIPADEIRNPVVLRALSQARKVINGVVRRYGSPARIHIETAREVGKSFKDRKEIEKRQEENRKDREKAAAKFREYFPNFVGEPKSKDILKLRLYEQQHGKCLYSGKEINLVRLNEKGYVEIDHALPFSRTWDDSFNNKVLVLGSENQNKGNQTPYEYFNGKDNSREWQEFKARVETSRFPRSKKQRILLQKFDEDGFKECNLNDTRYVNRFLCQFVADHILLTGKGKRRVFASNGQITNLLRGFWGLRKVRAENDRHHALDAVVVACSTVAMQQKITRFVRYKEMNAFDGKTIDKETGKVLHQKTHFPQPWEFFAQEVMIRVFGKPDGKPEFEEADTPEKLRTLLAEKLSSRPEAVHEYVTPLFVSRAPNRKMSGAHKDTLRSAKRFVKHNEKISVKRVWLTEIKLADLENMVNYKNGREIELYEALKARLEAYGGNAKQAFDPKDNPFYKKGGQLVKAVRVEKTQESGVLLNKKNAYTIADNGDMVRVDVFCKVDKKGKNQYFIVPIYAWQVAENILPDIDCKGYRIDDSYTFCFSLHKYDLIAFQKDEKSKVEFAYYINCDSSNGRFYLAWHDKGSKEQQFRISTQNLVLIQKYQVNELGKEIRPCRLKKRPPVR

SEQ ID NO: 210 - protein, 1300 aa, Francisella tularensis
  REGION 1..1300: note = MISC_FEATURE - wild type Cpf1 polypeptide sequence
  source 1..1300: note = subspecies novicida
MSIYQEFVNKYSLSKTLRFELIPQGKTLENIKARGLILDDEKRAKDYKKAKQIIDKYHQFFIEEILSSVCISEDLLQNYSDVYFKLKKSDDDNLQKDFKSAKDTIKKQISEYIKDSEKFKNLFNQNLIDAKKGQESDLILWLKQSKDNGIELFKANSDITDIDEALEIIKSFKGWTTYFKGFHENRKNVYSSNDIPTSIIYRIVDDNLPKFLENKAKYESLKDKAPEAINYEQIKKDLAEELTFDIDYKTSEVNQRVFSLDEVFEIANFNNYLNQSGITKFNTIIGGKFVNGENTKRKGINEYINLYSQQINDKTLKKYKMSVLFKQILSDTESKSFVIDKLEDDSDVVTTMQSFYEQIAAFKTVEEKSIKETLSLLFDDLKAQKLDLSKIYFKNDKSLTDLSQQVFDDYSVIGTAVLEYITQQIAPKNLDNPSKKEQELIAKKTEKAKYLSLETIKLALEEFNKHRDIDKQCRFEEILANFAAIPMIFDEIAQNKDNLAQISIKYQNQGKKDLLQASAEDDVKAIKDLLDQTNNLLHKLKIFHISQSEDKANILDKDEHFYLVFEECYFELANIVPLYNKIRNYITQKPYSDEKFKLNFENSTLANGWDKNKEPDNTAILFIKDDKYYLGVMNKKNNKIFDDKAIKENKGEGYKKIVYKLLPGANKMLPKVFFSAKSIKFYNPSEDILRIRNHSTHTKNGSPQKGYEKFEFNIEDCRKFIDFYKQSISKHPEWKDFGFRFSDTQRYNSIDEFYREVENQGYKLTFENISESYIDSVVNQGKLYLFQIYNKDFSAYSKGRPNLHTLYWKALFDERNLQDVVYKLNGEAELFYRKQSIPKKITHPAKEAIANKNKDNPKKESVFEYDLIKDKRFTEDKFFFHCPITINFKSSGANKFNDEINLLLKEKANDVHILSIDRGERHLAYYTLVDGKGNIIKQDTFNIIGNDRMKTNYHDKLAAIEKDRDSARKDWKKINNIKEMKEGYLSQVVHEIAKLVIEYNAIVVFEDLNFGFKRGRFKVEKQVYQKLEKMLIEKLNYLVFKDNEFDKTGGVLRAYQLTAPFETFKKMGKQTGIIYYVPAGFTSKICPVTGFVNQLYPKYESVSKSQEFFSKFDKICYNLDKGYFEFSFDYKNFGDKAAKGKWTIASFGSRLINFRNSDKNHNWDTREVYPTKELEKLLKDYSIEYGHGECIKAAICGESDKKFFAKLTSVLNTILQMRNSKTGTELDYLISPVADVNGNFFDSRQAPKNMPQDADANGAYHIGLKGLMLLGRIKNNQEGKKLNLVIKNEEYFEFVQNRNN

SEQ ID NO: 211 - protein, 1300 aa, Francisella tularensis
  REGION 1..1300: note = MISC_FEATURE - Cpf1 D917A polypeptide sequence
  source 1..1300: note = subspecies novicida
MSIYQEFVNKYSLSKTLRFELIPQGKTLENIKARGLILDDEKRAKDYKKAKQIIDKYHQFFIEEILSSVCISEDLLQNYSDVYFKLKKSDDDNLQKDFKSAKDTIKKQISEYIKDSEKFKNLFNQNLIDAKKGQESDLILWLKQSKDNGIELFKANSDITDIDEALEIIKSFKGWTTYFKGFHENRKNVYSSNDIPTSIIYRIVDDNLPKFLENKAKYESLKDKAPEAINYEQIKKDLAEELTFDIDYKTSEVNQRVFSLDEVFEIANFNNYLNQSGITKFNTIIGGKFVNGENTKRKGINEYINLYSQQINDKTLKKYKMSVLFKQILSDTESKSFVIDKLEDDSDVVTTMQSFYEQIAAFKTVEEKSIKETLSLLFDDLKAQKLDLSKIYFKNDKSLTDLSQQVFDDYSVIGTAVLEYITQQIAPKNLDNPSKKEQELIAKKTEKAKYLSLETIKLALEEFNKHRDIDKQCRFEEILANFAAIPMIFDEIAQNKDNLAQISIKYQNQGKKDLLQASAEDDVKAIKDLLDQTNNLLHKLKIFHISQSEDKANILDKDEHFYLVFEECYFELANIVPLYNKIRNYITQKPYSDEKFKLNFENSTLANGWDKNKEPDNTAILFIKDDKYYLGVMNKKNNKIFDDKAIKENKGEGYKKIVYKLLPGANKMLPKVFFSAKSIKFYNPSEDILRIRNHSTHTKNGSPQKGYEKFEFNIEDCRKFIDFYKQSISKHPEWKDFGFRFSDTQRYNSIDEFYREVENQGYKLTFENISESYIDSVVNQGKLYLFQIYNKDFSAYSKGRPNLHTLYWKALFDERNLQDVVYKLNGEAELFYRKQSIPKKITHPAKEAIANKNKDNPKKESVFEYDLIKDKRFTEDKFFFHCPITINFKSSGANKFNDEINLLLKEKANDVHILSIARGERHLAYYTLVDGKGNIIKQDTFNIIGNDRMKTNYHDKLAAIEKDRDSARKDWKKINNIKEMKEGYLSQVVHEIAKLVIEYNAIVVFEDLNFGFKRGRFKVEKQVYQKLEKMLIEKLNYLVFKDNEFDKTGGVLRAYQLTAPFETFKKMGKQTGIIYYVPAGFTSKICPVTGFVNQLYPKYESVSKSQEFFSKFDKICYNLDKGYFEFSFDYKNFGDKAAKGKWTIASFGSRLINFRNSDKNHNWDTREVYPTKELEKLLKDYSIEYGHGECIKAAICGESDKKFFAKLTSVLNTILQMRNSKTGTELDYLISPVADVNGNFFDSRQAPKNMPQDADANGAYHIGLKGLMLLGRIKNNQEGKKLNLVIKNEEYFEFVQNRNN

SEQ ID NO: 212 - protein, 1300 aa, Francisella tularensis
  REGION 1..1300: note = MISC_FEATURE - Cpf1 E1006A polypeptide sequence
  source 1..1300: note = subspecies novicida
MSIYQEFVNKYSLSKTLRFELIPQGKTLENIKARGLILDDEKRAKDYKKAKQIIDKYHQFFIEEILSSVCISEDLLQNYSDVYFKLKKSDDDNLQKDFKSAKDTIKKQISEYIKDSEKFKNLFNQNLIDAKKGQESDLILWLKQSKDNGIELFKANSDITDIDEALEIIKSFKGWTTYFKGFHENRKNVYSSNDIPTSIIYRIVDDNLPKFLENKAKYESLKDKAPEAINYEQIKKDLAEELTFDIDYKTSEVNQRVFSLDEVFEIANFNNYLNQSGITKFNTIIGGKFVNGENTKRKGINEYINLYSQQINDKTLKKYKMSVLFKQILSDTESKSFVIDKLEDDSDVVTTMQSFYEQIAAFKTVEEKSIKETLSLLFDDLKAQKLDLSKIYFKNDKSLTDLSQQVFDDYSVIGTAVLEYITQQIAPKNLDNPSKKEQELIAKKTEKAKYLSLETIKLALEEFNKHRDIDKQCRFEEILANFAAIPMIFDEIAQNKDNLAQISIKYQNQGKKDLLQASAEDDVKAIKDLLDQTNNLLHKLKIFHISQSEDKANILDKDEHFYLVFEECYFELANIVPLYNKIRNYITQKPYSDEKFKLNFENSTLANGWDKNKEPDNTAILFIKDDKYYLGVMNKKNNKIFDDKAIKENKGEGYKKIVYKLLPGANKMLPKVFFSAKSIKFYNPSEDILRIRNHSTHTKNGSPQKGYEKFEFNIEDCRKFIDFYKQSISKHPEWKDFGFRFSDTQRYNSIDEFYREVENQGYKLTFENISESYIDSVVNQGKLYLFQIYNKDFSAYSKGRPNLHTLYWKALFDERNLQDVVYKLNGEAELFYRKQSIPKKITHPAKEAIANKNKDNPKKESVFEYDLIKDKRFTEDKFFFHCPITINFKSSGANKFNDEINLLLKEKANDVHILSIDRGERHLAYYTLVDGKGNIIKQDTFNIIGNDRMKTNYHDKLAAIEKDRDSARKDWKKINNIKEMKEGYLSQVVHEIAKLVIEYNAIVVFADLNFGFKRGRFKVEKQVYQKLEKMLIEKLNYLVFKDNEFDKTGGVLRAYQLTAPFETFKKMGKQTGIIYYVPAGFTSKICPVTGFVNQLYPKYESVSKSQEFFSKFDKICYNLDKGYFEFSFDYKNFGDKAAKGKWTIASFGSRLINFRNSDKNHNWDTREVYPTKELEKLLKDYSIEYGHGECIKAAICGESDKKFFAKLTSVLNTILQMRNSKTGTELDYLISPVADVNGNFFDSRQAPKNMPQDADANGAYHIGLKGLMLLGRIKNNQEGKKLNLVIKNEEYFEFVQNRNN

SEQ ID NO: 213 - protein, 1300 aa, Francisella tularensis
  REGION 1..1300: note = MISC_FEATURE - Cpf1 D1255A polypeptide sequence
  source 1..1300: note = subspecies novicida
MSIYQEFVNKYSLSKTLRFELIPQGKTLENIKARGLILDDEKRAKDYKKAKQIIDKYHQFFIEEILSSVCISEDLLQNYSDVYFKLKKSDDDNLQKDFKSAKDTIKKQISEYIKDSEKFKNLFNQNLIDAKKGQESDLILWLKQSKDNGIELFKANSDITDIDEALEIIKSFKGWTTYFKGFHENRKNVYSSNDIPTSIIYRIVDDNLPKFLENKAKYESLKDKAPEAINYEQIKKDLAEELTFDIDYKTSEVNQRVFSLDEVFEIANFNNYLNQSGITKFNTIIGGKFVNGENTKRKGINEYINLYSQQINDKTLKKYKMSVLFKQILSDTESKSFVIDKLEDDSDVVTTMQSFYEQIAAFKTVEEKSIKETLSLLFDDLKAQKLDLSKIYFKNDKSLTDLSQQVFDDYSVIGTAVLEYITQQIAPKNLDNPSKKEQELIAKKTEKAKYLSLETIKLALEEFNKHRDIDKQCRFEEILANFAAIPMIFDEIAQNKDNLAQISIKYQNQGKKDLLQASAEDDVKAIKDLLDQTNNLLHKLKIFHISQSEDKANILDKDEHFYLVFEECYFELANIVPLYNKIRNYITQKPYSDEKFKLNFENSTLANGWDKNKEPDNTAILFIKDDKYYLGVMNKKNNKIFDDKAIKENKGEGYKKIVYKLLPGANKMLPKVFFSAKSIKFYNPSEDILRIRNHSTHTKNGSPQKGYEKFEFNIEDCRKFIDFYKQSISKHPEWKDFGFRFSDTQRYNSIDEFYREVENQGYKLTFENISESYIDSVVNQGKLYLFQIYNKDFSAYSKGRPNLHTLYWKALFDERNLQDVVYKLNGEAELFYRKQSIPKKITHPAKEAIANKNKDNPKKESVFEYDLIKDKRFTEDKFFFHCPITINFKSSGANKFNDEINLLLKEKANDVHILSIDRGERHLAYYTLVDGKGNIIKQDTFNIIGNDRMKTNYHDKLAAIEKDRDSARKDWKKINNIKEMKEGYLSQVVHEIAKLVIEYNAIVVFEDLNFGFKRGRFKVEKQVYQKLEKMLIEKLNYLVFKDNEFDKTGGVLRAYQLTAPFETFKKMGKQTGIIYYVPAGFTSKICPVTGFVNQLYPKYESVSKSQEFFSKFDKICYNLDKGYFEFSFDYKNFGDKAAKGKWTIASFGSRLINFRNSDKNHNWDTREVYPTKELEKLLKDYSIEYGHGECIKAAICGESDKKFFAKLTSVLNTILQMRNSKTGTELDYLISPVADVNGNFFDSRQAPKNMPQDAAANGAYHIGLKGLMLLGRIKNNQEGKKLNLVIKNEEYFEFVQNRNN

SEQ ID NO: 214 - protein, 1300 aa, Francisella tularensis
  REGION 1..1300: note = MISC_FEATURE - Cpf1 D917A/E1006A polypeptide sequence
  source 1..1300: note = subspecies novicida
MSIYQEFVNKYSLSKTLRFELIPQGKTLENIKARGLILDDEKRAKDYKKAKQIIDKYHQFFIEEILSSVCISEDLLQNYSDVYFKLKKSDDDNLQKDFKSAKDTIKKQISEYIKDSEKFKNLFNQNLIDAKKGQESDLILWLKQSKDNGIELFKANSDITDIDEALEIIKSFKGWTTYFKGFHENRKNVYSSNDIPTSIIYRIVDDNLPKFLENKAKYESLKDKAPEAINYEQIKKDLAEELTFDIDYKTSEVNQRVFSLDEVFEIANFNNYLNQSGITKFNTIIGGKFVNGENTKRKGINEYINLYSQQINDKTLKKYKMSVLFKQILSDTESKSFVIDKLEDDSDVVTTMQSFYEQIAAFKTVEEKSIKETLSLLFDDLKAQKLDLSKIYFKNDKSLTDLSQQVFDDYSVIGTAVLEYITQQIAPKNLDNPSKKEQELIAKKTEKAKYLSLETIKLALEEFNKHRDIDKQCRFEEILANFAAIPMIFDEIAQNKDNLAQISIKYQNQGKKDLLQASAEDDVKAIKDLLDQTNNLLHKLKIFHISQSEDKANILDKDEHFYLVFEECYFELANIVPLYNKIRNYITQKPYSDEKFKLNFENSTLANGWDKNKEPDNTAILFIKDDKYYLGVMNKKNNKIFDDKAIKENKGEGYKKIVYKLLPGANKMLPKVFFSAKSIKFYNPSEDILRIRNHSTHTKNGSPQKGYEKFEFNIEDCRKFIDFYKQSISKHPEWKDFGFRFSDTQRYNSIDEFYREVENQGYKLTFENISESYIDSVVNQGKLYLFQIYNKDFSAYSKGRPNLHTLYWKALFDERNLQDVVYKLNGEAELFYRKQSIPKKITHPAKEAIANKNKDNPKKESVFEYDLIKDKRFTEDKFFFHCPITINFKSSGANKFNDEINLLLKEKANDVHILSIARGERHLAYYTLVDGKGNIIKQDTFNIIGNDRMKTNYHDKLAAIEKDRDSARKDWKKINNIKEMKEGYLSQVVHEIAKLVIEYNAIVVFADLNFGFKRGRFKVEKQVYQKLEKMLIEKLNYLVFKDNEFDKTGGVLRAYQLTAPFETFKKMGKQTGIIYYVPAGFTSKICPVTGFVNQLYPKYESVSKSQEFFSKFDKICYNLDKGYFEFSFDYKNFGDKAAKGKWTIASFGSRLINFRNSDKNHNWDTREVYPTKELEKLLKDYSIEYGHGECIKAAICGESDKKFFAKLTSVLNTILQMRNSKTGTELDYLISPVADVNGNFFDSRQAPKNMPQDADANGAYHIGLKGLMLLGRIKNNQEGKKLNLVIKNEEYFEFVQNRNN

SEQ ID NO: 215 - protein, 1300 aa, Francisella tularensis
  REGION 1..1300: note = MISC_FEATURE - Cpf1 D917A/D1255A polypeptide sequence
  source 1..1300: note = subspecies novicida
MSIYQEFVNKYSLSKTLRFELIPQGKTLENIKARGLILDDEKRAKDYKKAKQIIDKYHQFFIEEILSSVCISEDLLQNYSDVYFKLKKSDDDNLQKDFKSAKDTIKKQISEYIKDSEKFKNLFNQNLIDAKKGQESDLILWLKQSKDNGIELFKANSDITDIDEALEIIKSFKGWTTYFKGFHENRKNVYSSNDIPTSIIYRIVDDNLPKFLENKAKYESLKDKAPEAINYEQIKKDLAEELTFDIDYKTSEVNQRVFSLDEVFEIANFNNYLNQSGITKFNTIIGGKFVNGENTKRKGINEYINLYSQQINDKTLKKYKMSVLFKQILSDTESKSFVIDKLEDDSDVVTTMQSFYEQIAAFKTVEEKSIKETLSLLFDDLKAQKLDLSKIYFKNDKSLTDLSQQVFDDYSVIGTAVLEYITQQIAPKNLDNPSKKEQELIAKKTEKAKYLSLETIKLALEEFNKHRDIDKQCRFEEILANFAAIPMIFDEIAQNKDNLAQISIKYQNQGKKDLLQASAEDDVKAIKDLLDQTNNLLHKLKIFHISQSEDKANILDKDEHFYLVFEECYFELANIVPLYNKIRNYITQKPYSDEKFKLNFENSTLANGWDKNKEPDNTAILFIKDDKYYLGVMNKKNNKIFDDKAIKENKGEGYKKIVYKLLPGANKMLPKVFFSAKSIKFYNPSEDILRIRNHSTHTKNGSPQKGYEKFEFNIEDCRKFIDFYKQSISKHPEWKDFGFRFSDTQRYNSIDEFYREVENQGYKLTFENISESYIDSVVNQGKLYLFQIYNKDFSAYSKGRPNLHTLYWKALFDERNLQDVVYKLNGEAELFYRKQSIPKKITHPAKEAIANKNKDNPKKESVFEYDLIKDKRFTEDKFFFHCPITINFKSSGANKFNDEINLLLKEKANDVHILSIARGERHLAYYTLVDGKGNIIKQDTFNIIGNDRMKTNYHDKLAAIEKDRDSARKDWKKINNIKEMKEGYLSQVVHEIAKLVIEYNAIVVFEDLNFGFKRGRFKVEKQVYQKLEKMLIEKLNYLVFKDNEFDKTGGVLRAYQLTAPFETFKKMGKQTGIIYYVPAGFTSKICPVTGFVNQLYPKYESVSKSQEFFSKFDKICYNLDKGYFEFSFDYKNFGDKAAKGKWTIASFGSRLINFRNSDKNHNWDTREVYPTKELEKLLKDYSIEYGHGECIKAAICGESDKKFFAKLTSVLNTILQMRNSKTGTELDYLISPVADVNGNFFDSRQAPKNMPQDAAANGAYHIGLKGLMLLGRIKNNQEGKKLNLVIKNEEYFEFVQNRNN

SEQ ID NO: 216 - protein, 1300 aa, Francisella tularensis
  REGION 1..1300: note = MISC_FEATURE - Cpf1 E1006A/D1255A polypeptide sequence
  source 1..1300: note = subspecies novicida
MSIYQEFVNKYSLSKTLRFELIPQGKTLENIKARGLILDDEKRAKDYKKAKQIIDKYHQFFIEEILSSVCISEDLLQNYSDVYFKLKKSDDDNLQKDFKSAKDTIKKQISEYIKDSEKFKNLFNQNLIDAKKGQESDLILWLKQSKDNGIELFKANSDITDIDEALEIIKSFKGWTTYFKGFHENRKNVYSSNDIPTSIIYRIVDDNLPKFLENKAKYESLKDKAPEAINYEQIKKDLAEELTFDIDYKTSEVNQRVFSLDEVFEIANFNNYLNQSGITKFNTIIGGKFVNGENTKRKGINEYINLYSQQINDKTLKKYKMSVLFKQILSDTESKSFVIDKLEDDSDVVTTMQSFYEQIAAFKTVEEKSIKETLSLLFDDLKAQKLDLSKIYFKNDKSLTDLSQQVFDDYSVIGTAVLEYITQQIAPKNLDNPSKKEQELIAKKTEKAKYLSLETIKLALEEFNKHRDIDKQCRFEEILANFAAIPMIFDEIAQNKDNLAQISIKYQNQGKKDLLQASAEDDVKAIKDLLDQTNNLLHKLKIFHISQSEDKANILDKDEHFYLVFEECYFELANIVPLYNKIRNYITQKPYSDEKFKLNFENSTLANGWDKNKEPDNTAILFIKDDKYYLGVMNKKNNKIFDDKAIKENKGEGYKKIVYKLLPGANKMLPKVFFSAKSIKFYNPSEDILRIRNHSTHTKNGSPQKGYEKFEFNIEDCRKFIDFYKQSISKHPEWKDFGFRFSDTQRYNSIDEFYREVENQGYKLTFENISESYIDSVVNQGKLYLFQIYNKDFSAYSKGRPNLHTLYWKALFDERNLQDVVYKLNGEAELFYRKQSIPKKITHPAKEAIANKNKDNPKKESVFEYDLIKDKRFTEDKFFFHCPITINFKSSGANKFNDEINLLLKEKANDVHILSIDRGERHLAYYTLVDGKGNIIKQDTFNIIGNDRMKTNYHDKLAAIEKDRDSARKDWKKINNIKEMKEGYLSQVVHEIAKLVIEYNAIVVFADLNFGFKRGRFKVEKQVYQKLEKMLIEKLNYLVFKDNEFDKTGGVLRAYQLTAPFETFKKMGKQTGIIYYVPAGFTSKICPVTGFVNQLYPKYESVSKSQEFFSKFDKICYNLDKGYFEFSFDYKNFGDKAAKGKWTIASFGSRLINFRNSDKNHNWDTREVYPTKELEKLLKDYSIEYGHGECIKAAICGESDKKFFAKLTSVLNTILQMRNSKTGTELDYLISPVADVNGNFFDSRQAPKNMPQDAAANGAYHIGLKGLMLLGRIKNNQEGKKLNLVIKNEEYFEFVQNRNN

SEQ ID NO: 217 - protein, 1300 aa, Francisella tularensis
  REGION 1..1300: note = MISC_FEATURE - Cpf1 D917A/E1006A/D1255A polypeptide sequence
  source 1..1300: note = subspecies novicida
MSIYQEFVNKYSLSKTLRFELIPQGKTLENIKARGLILDDEKRAKDYKKAKQIIDKYHQFFIEEILSSVCISEDLLQNYSDVYFKLKKSDDDNLQKDFKSAKDTIKKQISEYIKDSEKFKNLFNQNLIDAKKGQESDLILWLKQSKDNGIELFKANSDITDIDEALEIIKSFKGWTTYFKGFHENRKNVYSSNDIPTSIIYRIVDDNLPKFLENKAKYESLKDKAPEAINYEQIKKDLAEELTFDIDYKTSEVNQRVFSLDEVFEIANFNNYLNQSGITKFNTIIGGKFVNGENTKRKGINEYINLYSQQINDKTLKKYKMSVLFKQILSDTESKSFVIDKLEDDSDVVTTMQSFYEQIAAFKTVEEKSIKETLSLLFDDLKAQKLDLSKIYFKNDKSLTDLSQQVFDDYSVIGTAVLEYITQQIAPKNLDNPSKKEQELIAKKTEKAKYLSLETIKLALEEFNKHRDIDKQCRFEEILANFAAIPMIFDEIAQNKDNLAQISIKYQNQGKKDLLQASAEDDVKAIKDLLDQTNNLLHKLKIFHISQSEDKANILDKDEHFYLVFEECYFELANIVPLYNKIRNYITQKPYSDEKFKLNFENSTLANGWDKNKEPDNTAILFIKDDKYYLGVMNKKNNKIFDDKAIKENKGEGYKKIVYKLLPGANKMLPKVFFSAKSIKFYNPSEDILRIRNHSTHTKNGSPQKGYEKFEFNIEDCRKFIDFYKQSISKHPEWKDFGFRFSDTQRYNSIDEFYREVENQGYKLTFENISESYIDSVVNQGKLYLFQIYNKDFSAYSKGRPNLHTLYWKALFDERNLQDVVYKLNGEAELFYRKQSIPKKITHPAKEAIANKNKDNPKKESVFEYDLIKDKRFTEDKFFFHCPITINFKSSGANKFNDEINLLLKEKANDVHILSIARGERHLAYYTLVDGKGNIIKQDTFNIIGNDRMKTNYHDKLAAIEKDRDSARKDWKKINNIKEMKEGYLSQVVHEIAKLVIEYNAIVVFADLNFGFKRGRFKVEKQVYQKLEKMLIEKLNYLVFKDNEFDKTGGVLRAYQLTAPFETFKKMGKQTGIIYYVPAGFTSKICPVTGFVNQLYPKYESVSKSQEFFSKFDKICYNLDKGYFEFSFDYKNFGDKAAKGKWTIASFGSRLINFRNSDKNHNWDTREVYPTKELEKLLKDYSIEYGHGECIKAAICGESDKKFFAKLTSVLNTILQMRNSKTGTELDYLISPVADVNGNFFDSRQAPKNMPQDAAANGAYHIGLKGLMLLGRIKNNQEGKKLNLVIKNEEYFEFVQNRNN

SEQ ID NO: 218 - protein, 1052 aa, Staphylococcus aureus
  REGION 1..1052: note = MISC_FEATURE - Exemplary SaCas9 polypeptide sequence
KRNYILGLDIGITSVGYGIIDYETRDVIDAGVRLFKEANVENNEGRRSKRGARRLKRRRRHRIQRVKKLLFDYNLLTDHSELSGINPYEARVKGLSQKLSEEEFSAALLHLAKRRGVHNVNEVEEDTGNELSTKEQISRNSKALEEKYVAELQLERLKKDGEVRGSINRFKTSDYVKEAKQLLKVQKAYHQLDQSFIDTYIDLLETRRTYYEGPGEGSPFGWKDIKEWYEMLMGHCTYFPEELRSVKYAYNADLYNALNDLNNLVITRDENEKLEYYEKFQIIENVFKQKKKPTLKQIAKEILVNEEDIKGYRVTSTGKPEFTNLKVYHDIKDITARKEIIENAELLDQIAKILTIYQSSEDIQEELTNLNSELTQEEIEQISNLKGYTGTHNLSLKAINLILDELWHTNDNQIAIFNRLKLVPKKVDLSQQKEIPTTLVDDFILSPVVKRSFIQSIKVINAIIKKYGLPNDIIIELAREKNSKDAQKMINEMQKRNRQTNERIEEIIRTTGKENAKYLIEKIKLHDMQEGKCLYSLEAIPLEDLLNNPFNYEVDHIIPRSVSFDNSFNNKVLVKQEENSKKGNRTPFQYLSSSDSKISYETFKKHILNLAKGKGRISKTKKEYLLEERDINRFSVQKDFINRNLVDTRYATRGLMNLLRSYFRVNNLDVKVKSINGGFTSFLRRKWKFKKERNKGYKHHAEDALIIANADFIFKEWKKLDKAKKVMENQMFEEKQAESMPEIETEQEYKEIFITPHQIKHIKDFKDYKYSHRVDKKPNRELINDTLYSTRKDDKGNTLIVNNLNGLYDKDNDKLKKLINKSPEKLLMYHHDPQTYQKLKLIMEQYGDEKNPLYKYYEETGNYLTKYSKKDNGPVIKKIKYYGNKLNAHLDITDDYPNSRNKVVKLSLKPYRFDVYLDNGVYKFVTVKNLDVIKKENYYEVNSKCYEEAKKLKKISNQAEFIASFYNNDLIKINGELYRVIGVNNDLLNRIEVNMIDITYREYLENMNDKRPPRIIKTIASKTQSIKKYSTDILGNLYEVKSKKHPQIIKKG

SEQ ID NO: 219 - protein, 1052 aa, Staphylococcus aureus
  REGION 1..1052: note = MISC_FEATURE - SaCas9n polypeptide sequence
KRNYILGLDIGITSVGYGIIDYETRDVIDAGVRLFKEANVENNEGRRSKRGARRLKRRRRHRIQRVKKLLFDYNLLTDHSELSGINPYEARVKGLSQKLSEEEFSAALLHLAKRRGVHNVNEVEEDTGNELSTKEQISRNSKALEEKYVAELQLERLKKDGEVRGSINRFKTSDYVKEAKQLLKVQKAYHQLDQSFIDTYIDLLETRRTYYEGPGEGSPFGWKDIKEWYEMLMGHCTYFPEELRSVKYAYNADLYNALNDLNNLVITRDENEKLEYYEKFQIIENVFKQKKKPTLKQIAKEILVNEEDIKGYRVTSTGKPEFTNLKVYHDIKDITARKEIIENAELLDQIAKILTIYQSSEDIQEELTNLNSELTQEEIEQISNLKGYTGTHNLSLKAINLILDELWHTNDNQIAIFNRLKLVPKKVDLSQQKEIPTTLVDDFILSPVVKRSFIQSIKVINAIIKKYGLPNDIIIELAREKNSKDAQKMINEMQKRNRQTNERIEEIIRTTGKENAKYLIEKIKLHDMQEGKCLYSLEAIPLEDLLNNPFNYEVDHIIPRSVSFDNSFNNKVLVKQEEASKKGNRTPFQYLSSSDSKISYETFKKHILNLAKGKGRISKTKKEYLLEERDINRFSVQKDFINRNLVDTRYATRGLMNLLRSYFRVNNLDVKVKSINGGFTSFLRRKWKFKKERNKGYKHHAEDALIIANADFIFKEWKKLDKAKKVMENQMFEEKQAESMPEIETEQEYKEIFITPHQIKHIKDFKDYKYSHRVDKKPNRELINDTLYSTRKDDKGNTLIVNNLNGLYDKDNDKLKKLINKSPEKLLMYHHDPQTYQKLKLIMEQYGDEKNPLYKYYEETGNYLTKYSKKDNGPVIKKIKYYGNKLNAHLDITDDYPNSRNKVVKLSLKPYRFDVYLDNGVYKFVTVKNLDVIKKENYYEVNSKCYEEAKKLKKISNQAEFIASFYNNDLIKINGELYRVIGVNNDLLNRIEVNMIDITYREYLENMNDKRPPRIIKTIASKTQSIKKYSTDILGNLYEVKSKKHPQIIKKG

SEQ ID NO: 220 - protein, 1052 aa, Staphylococcus aureus
  REGION 1..1052: note = MISC_FEATURE - SaKKH Cas9 polypeptide sequence
KRNYILGLDIGITSVGYGIIDYETRDVIDAGVRLFKEANVENNEGRRSKRGARRLKRRRRHRIQRVKKLLFDYNLLTDHSELSGINPYEARVKGLSQKLSEEEFSAALLHLAKRRGVHNVNEVEEDTGNELSTKEQISRNSKALEEKYVAELQLERLKKDGEVRGSINRFKTSDYVKEAKQLLKVQKAYHQLDQSFIDTYIDLLETRRTYYEGPGEGSPFGWKDIKEWYEMLMGHCTYFPEELRSVKYAYNADLYNALNDLNNLVITRDENEKLEYYEKFQIIENVFKQKKKPTLKQIAKEILVNEEDIKGYRVTSTGKPEFTNLKVYHDIKDITARKEIIENAELLDQIAKILTIYQSSEDIQEELTNLNSELTQEEIEQISNLKGYTGTHNLSLKAINLILDELWHTNDNQIAIFNRLKLVPKKVDLSQQKEIPTTLVDDFILSPVVKRSFIQSIKVINAIIKKYGLPNDIIIELAREKNSKDAQKMINEMQKRNRQTNERIEEIIRTTGKENAKYLIEKIKLHDMQEGKCLYSLEAIPLEDLLNNPFNYEVDHIIPRSVSFDNSFNNKVLVKQEEASKKGNRTPFQYLSSSDSKISYETFKKHILNLAKGKGRISKTKKEYLLEERDINRFSVQKDFINRNLVDTRYATRGLMNLLRSYFRVNNLDVKVKSINGGFTSFLRRKWKFKKERNKGYKHHAEDALIIANADFIFKEWKKLDKAKKVMENQMFEEKQAESMPEIETEQEYKEIFITPHQIKHIKDFKDYKYSHRVDKKPNRKLINDTLYSTRKDDKGNTLIVNNLNGLYDKDNDKLKKLINKSPEKLLMYHHDPQTYQKLKLIMEQYGDEKNPLYKYYEETGNYLTKYSKKDNGPVIKKIKYYGNKLNAHLDITDDYPNSRNKVVKLSLKPYRFDVYLDNGVYKFVTVKNLDVIKKENYYEVNSKCYEEAKKLKKISNQAEFIASFYKNDLIKINGELYRVIGVNNDLLNRIEVNMIDITYREYLENMNDKRPPHIIKTIASKTQSIKKYSTDILGNLYEVKSKKHPQIIKKG

SEQ ID NO: 221 - protein, 707 aa, synthetic construct
  REGION 1..707: note = Casphi-1 polypeptide sequence
MADTPTLFTQFLRHHLPGQRFRKDILKQAGRILANKGEDATIAFLRGKSEESPPDFQPPVKCPIIACSRPLTEWPIYQASVAIQGYVYGQSLAEFEASDPGCSKDGLLGWFDKTGVCTDYFSVQGLNLIFQNARKRYIGVQTKVTNRNEKRHKKLKRINAKRIAEGLPELTSDEPESALDETGHLIDPPGLNTNIYCYQQVSPKPLALSEVNQLPTAYAGYSTSGDDPIQPMVTKDRLSISKGQPGYIPEHQRALLSQKKHRRMRGYGLKARALLVIVRIQDDWAVIDLRSLLRNAYWRRIVQTKEPSTITKLLKLVTGDPVLDATRMVATFTYKPGIVQVRSAKCLKNKQGSKLFSERYLNETVSVTSIDLGSNNLVAVATYRLVNGNTPELLQRFTLPSHLVKDFERYKQAHDTLEDSIQKTAVASLPQGQQTEIRMWSMYGFREAQERVCQELGLADGSIPWNVMTATSTILTDLFLARGGDPKKCMFTSEPKKKKNSKQVLYKIRDRAWAKMYRTLLSKETREAWNKALWGLKRGSPDYARLSKRKEELARRCVNYTISTAEKRAQCGRTIVALEDLNIGFFHGRGKQEPGWVGLFTRKKENRWLMQALHKAFLELAHHRGYHVIEVNPAYTSQTCPVCRHCDPDNRDQHNREAFHCIGCGFRGNADLDVATHNIAMVAITGESLKRARGSVASKTPQPLAAE

SEQ ID NO: 222 - protein, 757 aa, synthetic construct
  REGION 1..757: note = Casphi-2 polypeptide sequence
MPKPAVESEFSKVLKKHFPGERFRSSYMKRGGKILAAQGEEAVVAYLQGKSEEEPPNFQPPAKCHVVTKSRDFAEWPIMKASEAIQRYIYALSTTERAACKPGKSSESHAAWFAATGVSNHGYSHVQGLNLIFDHTLGRYDGVLKKVQLRNEKARARLESINASRADEGLPEIKAEEEEVATNETGHLLQPPGINPSFYVYQTISPQAYRPRDEIVLPPEYAGYVRDPNAPIPLGVVRNRCDIQKGCPGYIPEWQREAGTAISPKTGKAVTVPGLSPKKNKRMRRYWRSEKEKAQDALLVTVRIGTDWVVIDVRGLLRNARWRTIAPKDISLNALLDLFTGDPVIDVRRNIVTFTYTLDACGTYARKWTLKGKQTKATLDKLTATQTVALVAIDLGQTNPISAGISRVTQENGALQCEPLDRFTLPDDLLKDISAYRIAWDRNEEELRARSVEALPEAQQAEVRALDGVSKETARTQLCADFGLDPKRLPWDKMSSNTTFISEALLSNSVSRDQVFFTPAPKKGAKKKAPVEVMRKDRTWARAYKPRLSVEAQKLKNEALWALKRTSPEYLKLSRRKEELCRRSINYVIEKTRRRTQCQIVIPVIEDLNVRFFHGSGKRLPGWDNFFTAKKENRWFIQGLHKAFSDLRTHRSFYVFEVRPERTSITCPKCGHCEVGNRDGEAFQCLSCGKTCNADLDVATHNLTQVALTGKTMPKREEPRDAQGTAPARKTKKASKSKAPPAEREDQTPAQEPSQTS

SEQ ID NO: 223 - protein, 766 aa, synthetic construct
  REGION 1..766: note = Casphi-3 polypeptide sequence
MEKEITELTKIRREFPNKKFSSTDMKKAGKLLKAEGPDAVRDFLNSCQEIIGDFKPPVKTNIVSISRPFEEWPVSMVGRAIQEYYFSLTKEELESVHPGTSSEDHKSFFNITGLSNYNYTSVQGLNLIFKNAKAIYDGTLVKANNKNKKLEKKFNEINHKRSLEGLPIITPDFEEPFDENGHLNNPPGINRNIYGYQGCAAKVFVPSKHKMVSLPKEYEGYNRDPNLSLAGFRNRLEIPEGEPGHVPWFQRMDIPEGQIGHVNKIQRFNFVHGKNSGKVKFSDKTGRVKRYHHSKYKDATKPYKFLEESKKVSALDSILAIITIGDDWVVFDIRGLYRNVFYRELAQKGLTAVQLLDLFTGDPVIDPKKGVVTFSYKEGVVPVFSQKIVPRFKSRDTLEKLTSQGPVALLSVDLGQNEPVAARVCSLKNINDKITLDNSCRISFLDDYKKQIKDYRDSLDELEIKIRLEAINSLETNQQVEIRDLDVFSADRAKANTVDMFDIDPNLISWDSMSDARVSTQISDLYLKNGGDESRVYFEINNKRIKRSDYNISQLVRPKLSDSTRKNLNDSIWKLKRTSEEYLKLSKRKLELSRAVVNYTIRQSKLLSGINDIVIILEDLDVKKKFNGRGIRDIGWDNFFSSRKENRWFIPAFHKAFSELSSNRGLCVIEVNPAWTSATCPDCGFCSKENRDGINFTCRKCGVSYHADIDVATLNIARVAVLGKPMSGPADRERLGDTKKPRVARSRKTMKRKDISNSTVEAMVTA

SEQ ID NO: 224 - protein, 765 aa, synthetic construct
  REGION 1..765: note = Casphi-4 polypeptide sequence
MYSLEMADLKSEPSLLAKLLRDRFPGKYWLPKYWKLAEKKRLTGGEEAACEYMADKQLDSPPPNFRPPARCVILAKSRPFEDWPVHRVASKAQSFVIGLSEQGFAALRAAPPSTADARRDWLRSHGASEDDLMALEAQLLETIMGNAISLHGGVLKKIDNANVKAAKRLSGRNEARLNKGLQELPPEQEGSAYGADGLLVNPPGLNLNIYCRKSCCPKPVKNTARFVGHYPGYLRDSDSILISGTMDRLTIIEGMPGHIPAWQREQGLVKPGGRRRRLSGSESNMRQKVDPSTGPRRSTRSGTVNRSNQRTGRNGDPLLVEIRMKEDWVLLDARGLLRNLRWRESKRGLSCDHEDLSLSGLLALFSGDPVIDPVRNEVVFLYGEGIIPVRSTKPVGTRQSKKLLERQASMGPLTLISCDLGQTNLIAGRASAISLTHGSLGVRSSVRIELDPEIIKSFERLRKDADRLETEILTAAKETLSDEQRGEVNSHEKDSPQTAKASLCRELGLHPPSLPWGQMGPSTTFIADMLISHGRDDDAFLSHGEFPTLEKRKKFDKRFCLESRPLLSSETRKALNESLWEVKRTSSEYARLSQRKKEMARRAVNFVVEISRRKTGLSNVIVNIEDLNVRIFHGGGKQAPGWDGFFRPKSENRWFIQAIHKAFSDLAAHHGIPVIESDPQRTSMTCPECGHCDSKNRNGVRFLCKGCGASMDADFDAACRNLERVALTGKPMPKPSTSCERLLSATTGKVCSDHSLSHDAIEKAS

SEQ ID NO: 225 - protein, 793 aa, synthetic construct
  REGION 1..793: note = Casphi-5 polypeptide sequence
MSSLPTPLELLKQKHADLFKGLQFSSKDNKMAGKVLKKDGEEAALAFLSERGVSRGELPNFRPPAKTLVVAQSRPFEEFPIYRVSEAIQLYVYSLSVKELETVPSGSSTKKEHQRFFQDSSVPDFGYTSVQGLNKIFGLARGIYLGVITRGENQLQKAKSKHEALNKKRRASGEAETEFDPTPYEYMTPERKLAKPPGVNHSIMCYVDISVDEFDFRNPDGIVLPSEYAGYCREINTAIEKGTVDRLGHLKGGPGYIPGHQRKESTTEGPKINFRKGRIRRSYTALYAKRDSRRVRQGKLALPSYRHHMMRLNSNAESAILAVIFFGKDWVVFDLRGLLRNVRWRNLFVDGSTPSTLLGMFGDPVIDPKRGVVAFCYKEQIVPVVSKSITKMVKAPELLNKLYLKSEDPLVLVAIDLGQTNPVGVGVYRVMNASLDYEVVTRFALESELLREIESYRQRTNAFEAQIRAETFDAMTSEEQEEITRVRAFSASKAKENVCHRFGMPVDAVDWATMGSNTIHIAKWVMRHGDPSLVEVLEYRKDNEIKLDKNGVPKKVKLTDKRIANLTSIRLRFSQETSKHYNDTMWELRRKHPVYQKLSKSKADFSRRVVNSIIRRVNHLVPRARIVFIIEDLKNLGKVFHGSGKRELGWDSYFEPKSENRWFIQVLHKAFSETGKHKGYYIIECWPNWTSCTCPKCSCCDSENRHGEVFRCLACGYTCNTDFGTAPDNLVKIATTGKGLPGPKKRCKGSSKGKNPKIARSSETGVSVTESGAPKVKKSSPTQTSQSSSQSAP

SEQ ID NO: 226 - protein, 441 aa, synthetic construct
  REGION 1..441: note = Casphi-6 polypeptide sequence
MNKIEKEKTPLAKLMNENFAGLRFPFAIIKQAGKKLLKEGELKTIEYMTGKGSIEPLPNFKPPVKCLIVAKRRDLKYFPICKASCEIQSYVYSLNYKDFMDYFSTPMTSQKQHEEFFKKSGLNIEYQNVAGLNLIFNNVKNTYNGVILKVKNRNEKLKKKAIKNNYEFEEIKTFNDDGCLINKPGINNVIYCFQSISPKILKNITHLPKEYNDYDCSVDRNIIQKYVSRLDIPESQPGHVPEWQRKLPEFNNTNNPRRRRKWYSNGRNISKGYSVDQVNQAKIEDSLLAQIKIGEDWIILDIRGLLRDLNRRELISYKNKLTIKDVLGFFSDYPIIDIKKNLVTFCYKEGVIQVVSQKSIGNKKSKQLLEKLIENKPIALVSIDLGQTNPVSVKISKLNKINNKISIESFTYRFLNEEILKEIEKYRKDYDKLELKLINEA

SEQ ID NO: 227 - protein, 772 aa, synthetic construct
  REGION 1..772: note = Casphi-7 polypeptide sequence
MSNTAVSTREHMSNKTTPPSPLSLLLRAHFPGLKFESQDYKIAGKKLRDGGPEAVISYLTGKGQAKLKDVKPPAKAFVIAQSRPFIEWDLVRVSRQIQEKIFGIPATKGRPKQDGLSETAFNEAVASLEVDGKSKLNEETRAAFYEVLGLDAPSLHAQAQNALIKSAISIREGVLKKVENRNEKNLSKTKRRKEAGEEATFVEEKAHDERGYLIHPPGVNQTIPGYQAVVIKSCPSDFIGLPSGCLAKESAEALTDYLPHDRMTIPKGQPGYVPEWQHPLLNRRKNRRRRDWYSASLNKPKATCSKRSGTPNRKNSRTDQIQSGRFKGAIPVLMRFQDEWVIIDIRGLLRNARYRKLLKEKSTIPDLLSLFTGDPSIDMRQGVCTFIYKAGQACSAKMVKTKNAPEILSELTKSGPVVLVSIDLGQTNPIAAKVSRVTQLSDGQLSHETLLRELLSNDSSDGKEIARYRVASDRLRDKLANLAVERLSPEHKSEILRAKNDTPALCKARVCAALGLNPEMIAWDKMTPYTEFLATAYLEKGGDRKVATLKPKNRPEMLRRDIKFKGTEGVRIEVSPEAAEAYREAQWDLQRTSPEYLRLSTWKQELTKRILNQLRHKAAKSSQCEVVVMAFEDLNIKMMHGNGKWADGGWDAFFIKKRENRWFMQAFHKSLTELGAHKGVPTIEVTPHRTSITCTKCGHCDKANRDGERFACQKCGFVAHADLEIATDNIERVALTGKPMPKPESERSGDAKKSVGARKAAFKPEEDAEAAE

SEQ ID NO: 228 - protein, 717 aa, synthetic construct
  REGION 1..717: note = Casphi-8 polypeptide sequence
MIKPTVSQFLTPGFKLIRNHSRTAGLKLKNEGEEACKKFVRENEIPKDECPNFQGGPAIANIIAKSREFTEWEIYQSSLAIQEVIFTLPKDKLPEPILKEEWRAQWLSEHGLDTVPYKEAAGLNLIIKNAVNTYKGVQVKVDNKNKNNLAKINRKNEIAKLNGEQEISFEEIKAFDDKGYLLQKPSPNKSIYCYQSVSPKPFITSKYHNVNLPEEYIGYYRKSNEPIVSPYQFDRLRIPIGEPGYVPKWQYTFLSKKENKRRKLSKRIKNVSPILGIICIKKDWCVFDMRGLLRTNHWKKYHKPTDSINDLFDYFTGDPVIDTKANVVRFRYKMENGIVNYKPVREKKGKELLENICDQNGSCKLATVDVGQNNPVAIGLFELKKVNGELTKTLISRHPTPIDFCNKITAYRERYDKLESSIKLDAIKQLTSEQKIEVDNYNNNFTPQNTKQIVCSKLNINPNDLPWDKMISGTHFISEKAQVSNKSEIYFTSTDKGKTKDVMKSDYKWFQDYKPKLSKEVRDALSDIEWRLRRESLEFNKLSKSREQDARQLANWISSMCDVIGIENLVKKNNFFGGSGKREPGWDNFYKPKKENRWWINAIHKALTELSQNKGKRVILLPAMRTSITCPKCKYCDSKNRNGEKFNCLKCGIELNADIDVATENLATVAITAQSMPKPTCERSGDAKKPVRARKAKAPEFHDKLAPSYTVVLREAV

SEQ ID NO: 229 - protein, 793 aa, synthetic construct
  REGION 1..793: note = Casphi-9 polypeptide sequence
MRSSREIGDKILMRQPAEKTAFQVFRQEVIGTQKLSGGDAKTAGRLYKQGKMEAAREWLLKGARDDVPPNFQPPAKCLVVAVSHPFEEWDISKTNHDVQAYIYAQPLQAEGHLNGLSEKWEDTSADQHKLWFEKTGVPDRGLPVQAINKIAKAAVNRAFGVVRKVENRNEKRRSRDNRIAEHNRENGLTEVVREAPEVATNADGFLLHPPGIDPSILSYASVSPVPYNSSKHSFVRLPEEYQAYNVEPDAPIPQFVVEDRFAIPPGQPGYVPEWQRLKCSTNKHRRMRQWSNQDYKPKAGRRAKPLEFQAHLTRERAKGALLVVMRIKEDWVVFDVRGLLRNVEWRKVLSEEAREKLTLKGLLDLFTGDPVIDTKRGIVTFLYKAEITKILSKRTVKTKNARDLLLRLTEPGEDGLRREVGLVAVDLGQTHPIAAAIYRIGRTSAGALESTVLHRQGLREDQKEKLKEYRKRHTALDSRLRKEAFETLSVEQQKEIVTVSGSGAQITKDKVCNYLGVDPSTLPWEKMGSYTHFISDDFLRRGGDPNIVHFDRQPKKGKVSKKSQRIKRSDSQWVGRMRPRLSQETAKARMEADWAAQNENEEYKRLARSKQELARWCVNTLLQNTRCITQCDEIVVVIEDLNVKSLHGKGAREPGWDNFFTPKTENRWFIQILHKTFSELPKHRGEHVIEGCPLRTSITCPACSYCDKNSRNGEKFVCVACGATFHADFEVATYNLVRLATTGMPMPKSLERQGGGEKAGGARKARKKAKQVEKIVVQANANVTMNGASLHSP

SEQ ID NO: 230 - protein, 812 aa, synthetic construct
  REGION 1..812: note = Casphi-10 polypeptide sequence
MDMLDTETNYATETPAQQQDYSPKPPKKAQRAPKGFSKKARPEKKPPKPITLFTQKHFSGVRFLKRVIRDASKILKLSESRTITFLEQAIERDGSAPPDVTPPVHNTIMAVTRPFEEWPEVILSKALQKHCYALTKKIKIKTWPKKGPGKKCLAAWSARTKIPLIPGQVQATNGLFDRIGSIYDGVEKKVTNRNANKKLEYDEAIKEGRNPAVPEYETAYNIDGTLINKPGYNPNLYITQSRTPRLITEADRPLVEKILWQMVEKKTQSRNQARRARLEKAAHLQGLPVPKFVPEKVDRSQKIEIRIIDPLDKIEPYMPQDRMAIKASQDGHVPYWQRPFLSKRRNRRVRAGWGKQVSSIQAWLTGALLVIVRLGNEAFLADIRGALRNAQWRKLLKPDATYQSLFNLFTGDPVVNTRTNHLTMAYREGVVNIVKSRSFKGRQTREHLLTLLGQGKTVAGVSFDLGQKHAAGLLAAHFGLGEDGNPVFTPIQACFLPQRYLDSLTNYRNRYDALTLDMRRQSLLALTPAQQQEFADAQRDPGGQAKRACCLKLNLNPDEIRWDLVSGISTMISDLYIERGGDPRDVHQQVETKPKGKRKSEIRILKIRDGKWAYDFRPKIADETRKAQREQLWKLQKASSEFERLSRYKINIARAIANWALQWGRELSGCDIVIPVLEDLNVGSKFFDGKGKWLLGWDNRFTPKKENRWFIKVLHKAVAELAPHRGVPVYEVMPHRTSMTCPACHYCHPTNREGDRFECQSCHVVKNTDRDVAPYNILRVAVEGKTLDRWQAEKKPQAEPDRPMILIDNQES

SEQ ID NO: 231 - protein, 84 aa, synthetic construct
  REGION 1..84: note = synthetic polypeptide sequence
MTNLSDIIEKETGKQLVIQESILMLPEEVEEVIGNKPESDILVHTAYDESTDENVMLLTSDAPEYKPWALVIQDSNGENKIKML

SEQ ID NO: 232 - protein, 1129 aa, Alicyclobacillus acidoterrestris
  REGION 1..1129: note = MISC_FEATURE - Cas12b/C2c1; sp|T0D7A2|C2C1_ALIAG CRISPR-associated endonuclease C2c1 OS = Alicyclobacillus acido-terrestris (strain ATCC 49025 /DSM 3922/ CIP 106132 / NCIMB 13137/GD3B) GN=c2c1 PE=1 SV=1; Cas12b/C2c1 polypeptide sequence
MAVKSIKVKLRLDDMPEIRAGLWKLHKEVNAGVRYYTEWLSLLRQENLYRRSPNGDGEQECDKTAEECKAELLERLRARQVENGHRGPAGSDDELLQLARQLYELLVPQAIGAKGDAQQIARKFLSPLADKDAVGGLGIAKAGNKPRWVRMREAGEPGWEEEKEKAETRKSADRTADVLRALADFGLKPLMRVYTDSEMSSVEWKPLRKGQAVRTWDRDMFQQAIERMMSWESWNQRVGQEYAKLVEQKNRFEQKNFVGQEHLVHLVNQLQQDMKEASPGLESKEQTAHYVTGRALRGSDKVFEKWGKLAPDAPFDLYDAEIKNVQRRNTRRFGSHDLFAKLAEPEYQALWREDASFLTRYAVYNSILRKLNHAKMFATFTLPDATAHPIWTRFDKLGGNLHQYTFLFNEFGERRHAIRFHKLLKVENGVAREVDDVTVPISMSEQLDNLLPRDPNEPIALYFRDYGAEQHFTGEFGGAKIQCRRDQLAHMHRRRGARDVYLNVSVRVQSQSEARGERRPPYAAVFRLVGDNHRAFVHFDKLSDYLAEHPDDGKLGSEGLLSGLRVMSVDLGLRTSASISVFRVARKDELKPNSKGRVPFFFPIKGNDNLVAVHERSQLLKLPGETESKDLRAIREERQRTLRQLRTQLAYLRLLVRCGSEDVGRRERSWAKLIEQPVDAANHMTPDWREAFENELQKLKSLHGICSDKEWMDAVYESVRRVWRHMGKQVRDWRKDVRSGERPKIRGYAKDVVGGNSIEQIEYLERQYKFLKSWSFFGKVSGQVIRAEKGSRFAITLREHIDHAKEDRLKKLADRIIMEALGYVYALDERGKGKWVAKYPPCQLILLEELSEYQFNNDRPPSENNQLMQWSHRGVFQELINQAQVHDLLVGTMYAAFSSRFDARTGAPGIRCRRVPARCTQEHNPEPFPWWLNKFVVEHTLDACPLRADDLIPTGEGEIFVSPFSAEEGDFHQIHADLNAAQNLQQRLWSDFDISQIRLRCDWGEVDGELVLIPRLTGKRTADSYSNKVFYTNTGVTYYERERGKKRRKVFAQEKLSEEEAELLVEADEAREKSVVLMRDPSGIINRGNWTRQKEFWSMVNQRIEGYLVKQIRSRVPLQDSACENTGDI

SEQ ID NO: 233 - protein, 1368 aa, Mus musculus
  REGION 1..1368: note = MISC_FEATURE - high fidelity Cas9 polypeptide sequence
MDKKYSIGLAIGTNSVGWAVITDEYKVPSKKFKVLGNTDRHSIKKNLIGALLFDSGETAEATRLKRTARRRYTRRKNRICYLQEIFSNEMAKVDDSFFHRLEESFLVEEDKKHERHPIFGNIVDEVAYHEKYPTIYHLRKKLVDSTDKADLRLIYLALAHMIKFRGHFLIEGDLNPDNSDVDKLFIQLVQTYNQLFEENPINASGVDAKAILSARLSKSRRLENLIAQLPGEKKNGLFGNLIALSLGLTPNFKSNFDLAEDAKLQLSKDTYDDDLDNLLAQIGDQYADLFLAAKNLSDAILLSDILRVNTEITKAPLSASMIKRYDEHHQDLTLLKALVRQQLPEKYKEIFFDQSKNGYAGYIDGGASQEEFYKFIKPILEKMDGTEELLVKLNREDLLRKQRTFDNGSIPHQIHLGELHAILRRQEDFYPFLKDNREKIEKILTFRIPYYVGPLARGNSRFAWMTRKSEETITPWNFEEVVDKGASAQSFIERMTAFDKNLPNEKVLPKHSLLYEYFTVYNELTKVKYVTEGMRKPAFLSGEQKKAIVDLLFKTNRKVTVKQLKEDYFKKIECFDSVEISGVEDRFNASLGTYHDLLKIIKDKDFLDNEENEDILEDIVLTLTLFEDREMIEERLKTYAHLFDDKVMKQLKRRRYTGWGALSRKLINGIRDKQSGKTILDFLKSDGFANRNFMALIHDDSLTFKEDIQKAQVSGQGDSLHEHIANLAGSPAIKKGILQTVKVVDELVKVMGRHKPENIVIEMARENQTTQKGQKNSRERMKRIEEGIKELGSQILKEHPVENTQLQNEKLYLYYLQNGRDMYVDQELDINRLSDYDVDHIVPQSFLKDDSIDNKVLTRSDKNRGKSDNVPSEEVVKKMKNYWRQLLNAKLITQRKFDNLTKAERGGLSELDKAGFIKRQLVETRAITKHVAQILDSRMNTKYDENDKLIREVKVITLKSKLVSDFRKDFQFYKVREINNYHHAHDAYLNAVVGTALIKKYPKLESEFVYGDYKVYDVRKMIAKSEQEIGKATAKYFFYSNIMNFFKTEITLANGEIRKRPLIETNGETGEIVWDKGRDFATVRKVLSMPQVNIVKKTEVQTGGFSKESILPKRNSDKLIARKKDWDPKKYGGFDSPTVAYSVLVVAKVEKGKSKKLKSVKELLGITIMERSSFEKNPIDFLEAKGYKEVKKDLIIKLPKYSLFELENGRKRMLASAGELQKGNELALPSKYVNFLYLASHYEKLKGSPEDNEQKQLFVEQHKHYLDEIIEQISEFSKRVILADANLDKVLSAYNKHRDKPIREQAENIIHLFTLTNLGAPAAFKYFDTTIDRKRYTSTKEVLDATLIHQSITGLYETRIDLSQLGGD

SEQ ID NO: 234 - protein, 1368 aa, Streptococcus pyogenes
  REGION 1..1368: note = MISC_FEATURE - PAM-binding SpEQR Cas9 polypeptide sequence
MDKKYSIGLAIGTNSVGWAVITDEYKVPSKKFKVLGNTDRHSIKKNLIGALLFDSGETAEATRLKRTARRRYTRRKNRICYLQEIFSNEMAKVDDSFFHRLEESVLVEEDKKHERHPIFGNIVDEVAYHEKYPTIYHLRKKLVDSTDKADLRLIYLALAHMIKFRGHFLIEGDLNPDNSDVDKLFIQLVQTYNQLFEENPINASGVDAKAILSARLSKSRRLENLIAQLPGEKKNGLFGNLIALSLGLTPNFKSNFDLAEDAKLQLSKDTYDDDLDNLLAQIGDQYADLFLAAKNLSDAILLSDILRVNTEITKAPLSASMIKRYDEHHQDLTLLKALVRQQLPEKYKEIFFDQSKNGYAGYIDGGASQEEFYKFIKPILEKMDGTEELLVKLNREDLLRKQRTFDNGSIPHQIHLGELHAILRRQEDFYPFLKDNREKIEKILTFRIPYYVGPLARGNSRFAWMTRKSEETITPWNFEEVVDKGASAQSFIERMTNFDKNLPNEKVLPKHSLLYEYFTVYNELTKVKYVTEGMRKPAFLSGEQKKAIVDLLFKTNRKVTVKQLKEDYFKKIECFDSVEISGVEDRFNASLGTYHDLLKIIKDKDFLDNEENEDILEDIVLTLTLFEDREMIEERLKTYAHLFDDKVMKQLKRRRYTGWGRLSRKLINGIRDKQSGKTILDFLKSDGFANRNFMQLIHDDSLTFKEDIQKAQVSGQGDSLHEHIANLAGSPAIKKGILQTVKVVDELVKVMGRHKPENIVIEMARENQTTQKGQKNSRERMKRIEEGIKELGSQILKEHPVENTQLQNEKLYLYYLQNGRDMYVDQELDINRLSDYDVDHIVPQSFLKDDSIDNKVLTRSDKNRGKSDNVPSEEVVKKMKNYWRQLLNAKLITQRKFDNLTKAERGGLSELDKAGFIKRQLVETRQITKHVAQILDSRMNTKYDENDKLIREVKVITLKSKLVSDFRKDFQFYKVREINNYHHAHDAYLNAVVGTALIKKYPKLESEFVYGDYKVYDVRKMIAKSEQEIGKATAKYFFYSNIMNFFKTEITLANGEIRKRPLIETNGETGEIVWDKGRDFATVRKVLSMPQVNIVKKTEVQTGGFSKESILPKRNSDKLIARKKDWDPKKYGGFESPTVAYSVLVVAKVEKGKSKKLKSVKELLGITIMERSSFEKNPIDFLEAKGYKEVKKDLIIKLPKYSLFELENGRKRMLASAGELQKGNELALPSKYVNFLYLASHYEKLKGSPEDNEQKQLFVEQHKHYLDEIIEQISEFSKRVILADANLDKVLSAYNKHRDKPIREQAENIIHLFTLTNLGAPAAFKYFDTTIDRKQYRSTKEVLDATLIHQSITGLYETRIDLSQLGGD

SEQ ID NO: 235 - protein, 1368 aa, Streptococcus pyogenes
  REGION 1..1368: note = MISC_FEATURE - PAM-binding SpVQR Cas9 polypeptide sequence
MDKKYSIGLAIGTNSVGWAVITDEYKVPSKKFKVLGNTDRHSIKKNLIGALLFDSGETAEATRLKRTARRRYTRRKNRICYLQEIFSNEMAKVDDSFFHRLEESFLVEEDKKHERHPIFGNIVDEVAYHEKYPTIYHLRKKLVDSTDKADLRLIYLALAHMIKFRGHFLIEGDLNPDNSDVDKLFIQLVQTYNQLFEENPINASGVDAKAILSARLSKSRRLENLIAQLPGEKKNGLFGNLIALSLGLTPNFKSNFDLAEDAKLQLSKDTYDDDLDNLLAQIGDQYADLFLAAKNLSDAILLSDILRVNTEITKAPLSASMIKRYDEHHQDLTLLKALVRQQLPEKYKEIFFDQSKNGYAGYIDGGASQEEFYKFIKPILEKMDGTEELLVKLNREDLLRKQRTFDNGSIPHQIHLGELHAILRRQEDFYPFLKDNREKIEKILTFRIPYYVGPLARGNSRFAWMTRKSEETITPWNFEEVVDKGASAQSFIERMTNFDKNLPNEKVLPKHSLLYEYFTVYNELTKVKYVTEGMRKPAFLSGEQKKAIVDLLFKTNRKVTVKQLKEDYFKKIECFDSVEISGVEDRFNASLGTYHDLLKIIKDKDFLDNEENEDILEDIVLTLTLFEDREMIEERLKTYAHLFDDKVMKQLKRRRYTGWGRLSRKLINGIRDKQSGKTILDFLKSDGFANRNFMQLIHDDSLTFKEDIQKAQVSGQGDSLHEHIANLAGSPAIKKGILQTVKVVDELVKVMGRHKPENIVIEMARENQTTQKGQKNSRERMKRIEEGIKELGSQILKEHPVENTQLQNEKLYLYYLQNGRDMYVDQELDINRLSDYDVDHIVPQSFLKDDSIDNKVLTRSDKNRGKSDNVPSEEVVKKMKNYWRQLLNAKLITQRKFDNLTKAERGGLSELDKAGFIKRQLVETRQITKHVAQILDSRMNTKYDENDKLIREVKVITLKSKLVSDFRKDFQFYKVREINNYHHAHDAYLNAVVGTALIKKYPKLESEFVYGDYKVYDVRKMIAKSEQEIGKATAKYFFYSNIMNFFKTEITLANGEIRKRPLIETNGETGEIVWDKGRDFATVRKVLSMPQVNIVKKTEVQTGGFSKESILPKRNSDKLIARKKDWDPKKYGGFVSPTVAYSVLVVAKVEKGKSKKLKSVKELLGITIMERSSFEKNPIDFLEAKGYKEVKKDLIIKLPKYSLFELENGRKRMLASAGELQKGNELALPSKYVNFLYLASHYEKLKGSPEDNEQKQLFVEQHKHYLDEIIEQISEFSKRVILADANLDKVLSAYNKHRDKPIREQAENIIHLFTLTNLGAPAAFKYFDTTIDRKQYRSTKEVLDATLIHQSITGLYETRIDLSQLGGD

SEQ ID NO: 236 - protein, 1368 aa, Streptococcus pyogenes
  REGION 1..1368: note = MISC_FEATURE - SpVQR Cas9 polypeptide sequence
MDKKYSIGLAIGTNSVGWAVITDEYKVPSKKFKVLGNTDRHSIKKNLIGALLFDSGETAEATRLKRTARRRYTRRKNRICYLQEIFSNEMAKVDDSFFHRLEESFLVEEDKKHERHPIFGNIVDEVAYHEKYPTIYHLRKKLVDSTDKADLRLIYLALAHMIKFRGHFLIEGDLNPDNSDVDKLFIQLVQTYNQLFEENPINASGVDAKAILSARLSKSRRLENLIAQLPGEKKNGLFGNLIALSLGLTPNFKSNFDLAEDAKLQLSKDTYDDDLDNLLAQIGDQYADLFLAAKNLSDAILLSDILRVNTEITKAPLSASMIKRYDEHHQDLTLLKALVRQQLPEKYKEIFFDQSKNGYAGYIDGGASQEEFYKFIKPILEKMDGTEELLVKLNREDLLRKQRTFDNGSIPHQIHLGELHAILRRQEDFYPFLKDNREKIEKILTFRIPYYVGPLARGNSRFAWMTRKSEETITPWNFEEVVDKGASAQSFIERMTNFDKNLPNEKVLPKHSLLYEYFTVYNELTKVKYVTEGMRKPAFLSGEQKKAIVDLLFKTNRKVTVKQLKEDYFKKIECFDSVEISGVEDRFNASLGTYHDLLKIIKDKDFLDNEENEDILEDIVLTLTLFEDREMIEERLKTYAHLFDDKVMKQLKRRRYTGWGRLSRKLINGIRDKQSGKTILDFLKSDGFANRNFMQLIHDDSLTFKEDIQKAQVSGQGDSLHEHIANLAGSPAIKKGILQTVKVVDELVKVMGRHKPENIVIEMARENQTTQKGQKNSRERMKRIEEGIKELGSQILKEHPVENTQLQNEKLYLYYLQNGRDMYVDQELDINRLSDYDVDHIVPQSFLKDDSIDNKVLTRSDKNRGKSDNVPSEEVVKKMKNYWRQLLNAKLITQRKFDNLTKAERGGLSELDKAGFIKRQLVETRQITKHVAQILDSRMNTKYDENDKLIREVKVITLKSKLVSDFRKDFQFYKVREINNYHHAHDAYLNAVVGTALIKKYPKLESEFVYGDYKVYDVRKMIAKSEQEIGKATAKYFFYSNIMNFFKTEITLANGEIRKRPLIETNGETGEIVWDKGRDFATVRKVLSMPQVNIVKKTEVQTGGFSKESILPKRNSDKLIARKKDWDPKKYGGFVSPTVAYSVLVVAKVEKGKSKKLKSVKELLGITIMERSSFEKNPIDFLEAKGYKEVKKDLIIKLPKYSLFELENGRKRMLASARELQKGNELALPSKYVNFLYLASHYEKLKGSPEDNEQKQLFVEQHKHYLDEIIEQISEFSKRVILADANLDKVLSAYNKHRDKPIREQAENIIHLFTLTNLGAPAAFKYFDTTIDRKEYRSTKEVLDATLIHQSITGLYETRIDLSQLGGD

SEQ ID NO: 237 - protein, 1359 aa, Streptococcus macacae
  REGION 1..1359: note = MISC_FEATURE - SpyMacCas9 polypeptide sequence
MDKKYSIGLDIGTNSVGWAVITDDYKVPSKKFKVLGNTDRHSIKKNLIGALLFGSGETAEATRLKRTARRRYTRRKNRICYLQEIFSNEMAKVDDSFFHRLEESFLVEEDKKHERHPIFGNIVDEVAYHEKYPTIYHLRKKLADSTDKADLRLIYLALAHMIKFRGHFLIEGDLNPDNSDVDKLFIQLVQIYNQLFEENPINASRVDAKAILSARLSKSRRLENLIAQLPGEKRNGLFGNLIALSLGLTPNFKSNFDLAEDAKLQLSKDTYDDDLDNLLAQIGDQYADLFLAAKNLSDAILLSDILRVNSEITKAPLSASMIKRYDEHHQDLTLLKALVRQQLPEKYKEIFFDQSKNGYAGYIDGGASQEEFYKFIKPILEKMDGTEELLVKLNREDLLRKQRTFDNGSIPHQIHLGELHAILRRQEDFYPFLKDNREKIEKILTFRIPYYVGPLARGNSRFAWMTRKSEETITPWNFEEVVDKGASAQSFIERMTNFDKNLPNEKVLPKHSLLYEYFTVYNELTKVKYVTEGMRKPAFLSGEQKKAIVDLLFKTNRKVTVKQLKEDYFKKIECFDSVEISGVEDRFNASLGAYHDLLKIIKDKDFLDNEENEDILEDIVLTLTLFEDRGMIEERLKTYAHLFDDKVMKQLKRRRYTGWGRLSRKLINGIRDKQSGKTILDFLKSDGFANRNFMQLIHDDSLTFKEDIQKAQVSGQGHSLHEQIANLAGSPAIKKGILQTVKIVDELVKVMGHKPENIVIEMARENQTTQKGQKNSRERMKRIEEGIKELGSQILKEHPVENTQLQNEKLYLYYLQNGRDMYVDQELDINRLSDYDVDHIVPQSFIKDDSIDNKVLTRSDKNRGKSDNVPSEEVVKKMKNYWRQLLNAKLITQRKFDNLTKAERGGLSELDKAGFIKRQLVETRQITKHVAQILDSRMNTKYDENDKLIREVKVITLKSKLVSDFRKDFQFYKVREINNYHHAHDAYLNAVVGTALIKKYPKLESEFVYGDYKVYDVRKMIAKSEQEIGKATAKYFFYSNIMNFFKTEITLANGEIRKRPLIETNGETGEIVWDKGRDFATVRKVLSMPQVNIVKKTEIQTVGQNGGLFDDNPKSPLEVTPSKLVPLKKELNPKKYGGYQKPTTAYPVLLITDTKQLIPISVMNKKQFEQNPVKFLRDRGYQQVGKNDFIKLPKYTLVDIGDGIKRLWASSKEIHKGNQLVVSKKSQILLYHAHHLDSDLSNDYLQNHNQQFDVLFNEIISFSKKCKLGKEHIQKIENVYSNKKNSASIEELAESFIKLLGFTQLGATSPFNFLGVKLNQKQYKGKKDYILPCTEGTLIRQSITGLYETRVDLSKIGED

SEQ ID NO: 238 - protein, 1410 aa, synthetic construct
  REGION 1..1410: note = CP5 polypeptide sequence
  REGION 1..341: note = MISC_FEATURE - Sequence derived from Cas9
  REGION 342..362: note = MISC_FEATURE - Linker sequence
  REGION 363..1388: note = MISC_FEATURE - Sequence derived from Cas9
  REGION 1389..1410: note = MISC_FEATURE - Bipartite nuclear localization sequence
EIGKATAKYFFYSNIMNFFKTEITLANGEIRKRPLIETNGETGEIVWDKGRDFATVRKVLSMPQVNIVKKTEVQTGGFSKESILPKRNSDKLIARKKDWDPKKYGGFMQPTVAYSVLVVAKVEKGKSKKLKSVKELLGITIMERSSFEKNPIDFLEAKGYKEVKKDLIIKLPKYSLFELENGRKRMLASAKFLQKGNELALPSKYVNFLYLASHYEKLKGSPEDNEQKQLFVEQHKHYLDEIIEQISEFSKRVILADANLDKVLSAYNKHRDKPIREQAENIIHLFTLTNLGAPRAFKYFDTTIARKEYRSTKEVLDATLIHQSITGLYETRIDLSQLGGDGGSGGSGGSGGSGGSGGSGGMDKKYSIGLAIGTNSVGWAVITDEYKVPSKKFKVLGNTDRHSIKKNLIGALLFDSGETAEATRLKRTARRRYTRRKNRICYLQEIFSNEMAKVDDSFFHRLEESFLVEEDKKHERHPIFGNIVDEVAYHEKYPTIYHLRKKLVDSTDKADLRLIYLALAHMIKFRGHFLIEGDLNPDNSDVDKLFIQLVQTYNQLFEENPINASGVDAKAILSARLSKSRRLENLIAQLPGEKKNGLFGNLIALSLGLTPNFKSNFDLAEDAKLQLSKDTYDDDLDNLLAQIGDQYADLFLAAKNLSDAILLSDILRVNTEITKAPLSASMIKRYDEHHQDLTLLKALVRQQLPEKYKEIFFDQSKNGYAGYIDGGASQEEFYKFIKPILEKMDGTEELLVKLNREDLLRKQRTFDNGSIPHQIHLGELHAILRRQEDFYPFLKDNREKIEKILTFRIPYYVGPLARGNSRFAWMTRKSEETITPWNFEEVVDKGASAQSFIERMTNFDKNLPNEKVLPKHSLLYEYFTVYNELTKVKYVTEGMRKPAFLSGEQKKAIVDLLFKTNRKVTVKQLKEDYFKKIECFDSVEISGVEDRFNASLGTYHDLLKIIKDKDFLDNEENEDILEDIVLTLTLFEDREMIEERLKTYAHLFDDKVMKQLKRRRYTGWGRLSRKLINGIRDKQSGKTILDFLKSDGFANRNFMQLIHDDSLTFKEDIQKAQVSGQGDSLHEHIANLAGSPAIKKGILQTVKVVDELVKVMGRHKPENIVIEMARENQTTQKGQKNSRERMKRIEEGIKELGSQILKEHPVENTQLQNEKLYLYYLQNGRDMYVDQELDINRLSDYDVDHIVPQSFLKDDSIDNKVLTRSDKNRGKSDNVPSEEVVKKMKNYWRQLLNAKLITQRKFDNLTKAERGGLSELDKAGFIKRQLVETRQITKHVAQILDSRMNTKYDENDKLIREVKVITLKSKLVSDFRKDFQFYKVREINNYHHAHDAYLNAVVGTALIKKYPKLESEFVYGDYKVYDVRKMIAKSEQEGADKRTADGSEFESPKKKRKV

SEQ ID NO: 239 - protein, 1302 aa, synthetic construct
  REGION 1..1302: note = Cas12c1 polypeptide sequence
MQTKKTHLHLISAKASRKYRRTIACLSDTAKKDLERRKQSGAADPAQELSCLKTIKFKLEVPEGSKLPSFDRISQIYNALETIEKGSLSYLLFALILSGFRIFPNSSAAKTFASSSCYKNDQFASQIKEIFGEMVKNFIPSELESILKKGRRKNNKDWTEENIKRVLNSEFGRKNSEGSSALFDSFLSKFSQELFRKFDSWNEVNKKYLEAAELLDSMLASYGPFDSVCKMIGDSDSRNSLPDKSTIAFTNNAEITVDIESSVMPYMAIAALLREYRQSKSKAAPVAYVQSHLTTTNGNGLSWFFKFGLDLIRKAPVSSKQSTSDGSKSLQELFSVPDDKLDGLKFIKEACEALPEASLLCGEKGELLGYQDFRTSFAGHIDSWVANYVNRLFELIELVNQLPESIKLPSILTQKNHNLVASLGLQEAEVSHSLELFEGLVKNVRQTLKKLAGIDISSSPNEQDIKEFYAFSDVLNRLGSIRNQIENAVQTAKKDKIDLESAIEWKEWKKLKKLPKLNGLGGGVPKQQELLDKALESVKQIRHYQRIDFERVIQWAVNEHCLETVPKFLVDAEKKKINKESSTDFAAKENAVRFLLEGIGAAARGKTDSVSKAAYNWFVVNNFLAKKDLNRYFINCQGCIYKPPYSKRRSLAFALRSDNKDTIEVVWEKFETFYKEISKEIEKFNIFSQEFQTFLHLENLRMKLLLRRIQKPIPAEIAFFSLPQEYYDSLPPNVAFLALNQEITPSEYITQFNLYSSFLNGNLILLRRSRSYLRAKFSWVGNSKLIYAAKEARLWKIPNAYWKSDEWKMILDSNVLVFDKAGNVLPAPTLKKVCEREGDLRLFYPLLRQLPHDWCYRNPFVKSVGREKNVIEVNKEGEPKVASALPGSLFRLIGPAPFKSLLDDCFFNPLDKDLRECMLIVDQEISQKVEAQKVEASLESCTYSIAVPIRYHLEEPKVSNQFENVLAIDQGEAGLAYAVFSLKSIGEAETKPIAVGTIRIPSIRRLIHSVSTYRKKKQRLQNFKQNYDSTAFIMRENVTGDVCAKIVGLMKEFNAFPVLEYDVKNLESGSRQLSAVYKAVNSHFLYFKEPGRDALRKQLWYGGDSWTIDGIEIVTRERKEDGKEGVEKIVPLKVFPGRSVSARFTSKTCSCCGRNVFDWLFTEKKAKTNKKFNVNSKGELTTADGVIQLFEADRSKGPKFYARRKERTPLTKPIAKGSYSLEEIERRVRTNLRRAPKSKQSRDTSQSQYFCVYKDCALHFSGMQADENAAINIGRRFLTALRKNRRSDFPSNVKISDRLLDN

SEQ ID NO: 240 - protein, 1218 aa, synthetic construct
  REGION 1..1218: note = Cas12c2 polypeptide sequence
MTKHSIPLHAFRNSGADARKWKGRIALLAKRGKETMRTLQFPLEMSEPEAAAINTTPFAVAYNAIEGTGKGTLFDYWAKLHLAGFRFFPSGGAATIFRQQAVFEDASWNAAFCQQSGKDWPWLVPSKLYERFTKAPREVAKKDGSKKSIEFTQENVANESHVSLVGASITDKTPEDQKEFFLKMAGALAEKFDSWKSANEDRIVAMKVIDEFLKSEGLHLPSLENIAVKCSVETKPDNATVAWHDAPMSGVQNLAIGVFATCASRIDNIYDLNGGKLSKLIQESATTPNVTALSWLFGKGLEYFRTTDIDTIMQDFNIPASAKESIKPLVESAQAIPTMTVLGKKNYAPFRPNFGGKIDSWIANYASRLMLLNDILEQIEPGFELPQALLDNETLMSGIDMTGDELKELIEAVYAWVDAAKQGLATLLGRGGNVDDAVQTFEQFSAMMDTLNGTLNTISARYVRAVEMAGKDEARLEKLIECKFDIPKWCKSVPKLVGISGGLPKVEEEIKVMNAAFKDVRARMFVRFEEIAAYVASKGAGMDVYDALEKRELEQIKKLKSAVPERAHIQAYRAVLHRIGRAVQNCSEKTKQLFSSKVIEMGVFKNPSHLNNFIFNQKGAIYRSPFDRSRHAPYQLHADKLLKNDWLELLAEISATLMASESTEQMEDALRLERTRLQLQLSGLPDWEYPASLAKPDIEVEIQTALKMQLAKDTVTSDVLQRAFNLYSSVLSGLTFKLLRRSFSLKMRFSVADTTQLIYVPKVCDWAIPKQYLQAEGEIGIAARVVTESSPAKMVTEVEMKEPKALGHFMQQAPHDWYFDASLGGTQVAGRIVEKGKEVGKERKLVGYRMRGNSAYKTVLDKSLVGNTELSQCSMIIEIPYTQTVDADFRAQVQAGLPKVSINLPVKETITASNKDEQMLFDRFVAIDLGERGLGYAVFDAKTLELQESGHRPIKAITNLLNRTHHYEQRPNQRQKFQAKFNVNLSELRENTVGDVCHQINRICAYYNAFPVLEYMVPDRLDKQLKSVYESVTNRYIWSSTDAHKSARVQFWLGGETWEHPYLKSAKDKKPLVLSPGRGASGKGTSQTCSCCGRNPFDLIKDMKPRAKIAVVDGKAKLENSELKLFERNLESKDDMLARRHRNERAGMEQPLTPGNYTVDEIKALLRANLRRAPKNRRTKDTTVSEYHCVFSDCGKTMHADENAAVNIGGKFIADIEK

SEQ ID NO: 241 - protein, 1252 aa, Oleiphilus sp.
  REGION 1..1252: note = MISC_FEATURE - OspCas12c polypeptide sequence
MTKLRHRQKKLTHDWAGSKKREVLGSNGKLQNPLLMPVKKGQVTEFRKAFSAYARATKGEMTDGRKNMFTHSFEPFKTKPSLHQCELADKAYQSLHSYLPGSLAHFLLSAHALGFRIFSKSGEATAFQASSKIEAYESKLASELACVDLSIQNLTISTLFNALTTSVRGKGEETSADPLIARFYTLLTGKPLSRDTQGPERDLAEVISRKIASSFGTWKEMTANPLQSLQFFEEELHALDANVSLSPAFDVLIKMNDLQGDLKNRTIVFDPDAPVFEYNAEDPADIIIKLTARYAKEAVIKNQNVGNYVKNAITTTNANGLGWLLNKGLSLLPVSTDDELLEFIGVERSHPSCHALIELIAQLEAPELFEKNVFSDTRSEVQGMIDSAVSNHIARLSSSRNSLSMDSEELERLIKSFQIHTPHCSLFIGAQSLSQQLESLPEALQSGVNSADILLGSTQYMLTNSLVEESIATYQRTLNRINYLSGVAGQINGAIKRKAIDGEKIHLPAAWSELISLPFIGQPVIDVESDLAHLKNQYQTLSNEFDTLISALQKNFDLNFNKALLNRTQHFEAMCRSTKKNALSKPEIVSYRDLLARLTSCLYRGSLVLRRAGIEVLKKHKIFESNSELREHVHERKHFVFVSPLDRKAKKLLRLTDSRPDLLHVIDEILQHDNLENKDRESLWLVRSGYLLAGLPDQLSSSFINLPIITQKGDRRLIDLIQYDQINRDAFVMLVTSAFKSNLSGLQYRANKQSFVVTRTLSPYLGSKLVYVPKDKDWLVPSQMFEGRFADILQSDYMVWKDAGRLCVIDTAKHLSNIKKSVFSSEEVLAFLRELPHRTFIQTEVRGLGVNVDGIAFNNGDIPSLKTFSNCVQVKVSRTNTSLVQTLNRWFEGGKVSPPSIQFERAYYKKDDQIHEDAAKRKIRFQMPATELVHASDDAGWTPSYLLGIDPGEYGMGLSLVSINNGEVLDSGFIHINSLINFASKKSNHQTKVVPRQQYKSPYANYLEQSKDSAAGDIAHILDRLIYKLNALPVFEALSGNSQSAADQVWTKVLSFYTWGDNDAQNSIRKQHWFGASHWDIKGMLRQPPTEKKPKPYIAFPGSQVSSYGNSQRCSCCGRNPIEQLREMAKDTSIKELKIRNSEIQLFDGTIKLFNPDPSTVIERRRHNLGPSRIPVADRTFKNISPSSLEFKELITIVSRSIRHSPEFIAKKRGIGSEYFCAYSDCNSSLNSEANAAANVAQKFQKQLFFEL

SEQ ID NO: 242 - protein, 767 aa, synthetic construct
  REGION 1..767: note = Cas12g1 polypeptide sequence
MAQASSTPAVSPRPRPRYREERTLVRKLLPRPGQSKQEFRENVKKLRKAFLQFNADVSGVCQWAIQFRPRYGKPAEPTETFWKFFLEPETSLPPNDSRSPEFRRLQAFEAAAGINGAAALDDPAFTNELRDSILAVASRPKTKEAQRLFSRLKDYQPAHRMILAKVAAEWIESRYRRAHQNWERNYEEWKKEKQEWEQNHPELTPEIREAFNQIFQQLEVKEKRVRICPAARLLQNKDNCQYAGKNKHSVLCNQFNEFKKNHLQGKAIKFFYKDAEKYLRCGLQSLKPNVQGPFREDWNKYLRYMNLKEETLRGKNGGRLPHCKNLGQECEFNPHTALCKQYQQQLSSRPDLVQHDELYRKWRREYWREPRKPVFRYPSVKRHSIAKIFGENYFQADFKNSVVGLRLDSMPAGQYLEFAFAPWPRNYRPQPGETEISSVHLHFVGTRPRIGFRFRVPHKRSRFDCTQEELDELRSRTFPRKAQDQKFLEAARKRLLETFPGNAEQELRLLAVDLGTDSARAAFFIGKTFQQAFPLKIVKIEKLYEQWPNQKQAGDRRDASSKQPRPGLSRDHVGRHLQKMRAQASEIAQKRQELTGTPAPETTTDQAAKKATLQPFDLRGLTVHTARMIRDWARLNARQIIQLAEENQVDLIVLESLRGFRPPGYENLDQEKKRRVAFFAHGRIRRKVTEKAVERGMRVVTVPYLASSKVCAECRKKQKDNKQWEKNKKRGLFKCEGCGSQAQVDENAARVLGRVFWGEIELPTAIP

SEQ ID NO: 243 - protein, 870 aa, synthetic construct
  REGION 1..870: note = Cas12h1 polypeptide sequence
MKVHEIPRSQLLKIKQYEGSFVEWYRDLQEDRKKFASLLFRWAAFGYAAREDDGATYISPSQALLERRLLLGDAEDVAIKFLDVLFKGGAPSSSCYSLFYEDFALRDKAKYSGAKREFIEGLATMPLDKIIERIRQDEQLSKIPAEEWLILGAEYSPEEIWEQVAPRIVNVDRSLGKQLRERLGIKCRRPHDAGYCKILMEVVARQLRSHNETYHEYLNQTHEMKTKVANNLTNEFDLVCEFAEVLEEKNYGLGWYVLWQGVKQALKEQKKPTKIQIAVDQLRQPKFAGLLTAKWRALKGAYDTWKLKKRLEKRKAFPYMPNWDNDYQIPVGLTGLGVFTLEVKRTEVVVDLKEHGKLFCSHSHYFGDLTAEKHPSRYHLKFRHKLKLRKRDSRVEPTIGPWIEAALREITIQKKPNGVFYLGLPYALSHGIDNFQIAKRFFSAAKPDKEVINGLPSEMVVGAADLNLSNIVAPVKARIGKGLEGPLHALDYGYGELIDGPKILTPDGPRCGELISLKRDIVEIKSAIKEFKACQREGLTMSEETTTWLSEVESPSDSPRCMIQSRIADTSRRLNSFKYQMNKEGYQDLAEALRLLDAMDSYNSLLESYQRMHLSPGEQSPKEAKFDTKRASFRDLLRRRVAHTIVEYFDDCDIVFFEDLDGPSDSDSRNNALVKLLSPRTLLLYIRQALEKRGIGMVEVAKDGTSQNNPISGHVGWRNKQNKSEIYFYEDKELLVMDADEVGAMNILCRGLNHSVCPYSFVTKAPEKKNDEKKEGDYGKRVKRFLKDRYGSSNVRFLVASMGFVTVTTKRPKDALVGKRLYYHGGELVTHDLHNRMKDEIKYLVEKEVLARRVSLSDSTIKSYKSFAHV

SEQ ID NO: 244 - protein, 1093 aa, synthetic construct
  REGION 1..1093: note = Cas12i1 polypeptide sequence
MSNKEKNASETRKAYTTKMIPRSHDRMKLLGNFMDYLMDGTPIFFELWNQFGGGIDRDIISGTANKDKISDDLLLAVNWFKVMPINSKPQGVSPSNLANLFQQYSGSEPDIQAQEYFASNFDTEKHQWKDMRVEYERLLAELQLSRSDMHHDLKLMYKEKCIGLSLSTAHYITSVMFGTGAKNNRQTKHQFYSKVIQLLEESTQINSVEQLASIILKAGDCDSYRKLRIRCSRKGATPSILKIVQDYELGTNHDDEVNVPSLIANLKEKLGRFEYECEWKCMEKIKAFLASKVGPYYLGSYSAMLENALSPIKGMTTKNCKFVLKQIDAKNDIKYENEPFGKIVEGFFDSPYFESDTNVKWVLHPHHIGESNIKTLWEDLNAIHSKYEEDIASLSEDKKEKRIKVYQGDVCQTINTYCEEVGKEAKTPLVQLLRYLYSRKDDIAVDKIIDGITFLSKKHKVEKQKINPVIQKYPSFNFGNNSKLLGKIISPKDKLKHNLKCNRNQVDNYIWIEIKVLNTKTMRWEKHHYALSSTRFLEEVYYPATSENPPDALAARFRTKTNGYEGKPALSAEQIEQIRSAPVGLRKVKKRQMRLEAARQQNLLPRYTWGKDFNINICKRGNNFEVTLATKVKKKKEKNYKVVLGYDANIVRKNTYAAIEAHANGDGVIDYNDLPVKPIESGFVTVESQVRDKSYDQLSYNGVKLLYCKPHVESRRSFLEKYRNGTMKDNRGNNIQIDFMKDFEAIADDETSLYYFNMKYCKLLQSSIRNHSSQAKEYREEIFELLRDGKLSVLKLSSLSNLSFVMFKVAKSLIGTYFGHLLKKPKNSKSDVKAPPITDEDKQKADPEMFALRLALEEKRLNKVKSKKEVIANKIVAKALELRDKYGPVLIKGENISDTTKKGKKSSTNSFLMDWLARGVANKVKEMVMMHQGLEFVEVNPNFTSHQDPFVHKNPENTFRARYSRCTPSELTEKNRKEILSFLSDKPSKRPTNAYYNEGAMAFLATYGLKKNDVLGVSLEKFKQIMANILHQRSEDQLLFPSRGGMFYLATYKLDADATSVNWNGKQFWVCNADLVAAYNVGLVDIQKDFKKK

SEQ ID NO: 245 - protein, 1054 aa, synthetic construct
  REGION 1..1054: note = Cas12i2 polypeptide sequence
MSSAIKSYKSVLRPNERKNQLLKSTIQCLEDGSAFFFKMLQGLFGGITPEIVRFSTEQEKQQQDIALWCAVNWFRPVSQDSLTHTIASDNLVEKFEEYYGGTASDAIKQYFSASIGESYYWNDCRQQYYDLCRELGVEVSDLTHDLEILCREKCLAVATESNQNNSIISVLFGTGEKEDRSVKLRITKKILEAISNLKEIPKNVAPIQEIILNVAKATKETFRQVYAGNLGAPSTLEKFIAKDGQKEFDLKKLQTDLKKVIRGKSKERDWCCQEELRSYVEQNTIQYDLWAWGEMFNKAHTALKIKSTRNYNFAKQRLEQFKEIQSLNNLLVVKKLNDFFDSEFFSGEETYTICVHHLGGKDLSKLYKAWEDDPADPENAIVVLCDDLKNNFKKEPIRNILRYIFTIRQECSAQDILAAAKYNQQLDRYKSQKANPSVLGNQGFTWTNAVILPEKAQRNDRPNSLDLRIWLYLKLRHPDGRWKKHHIPFYDTRFFQEIYAAGNSPVDTCQFRTPRFGYHLPKLTDQTAIRVNKKHVKAAKTEARIRLAIQQGTLPVSNLKITEISATINSKGQVRIPVKFDVGRQKGTLQIGDRFCGYDQNQTASHAYSLWEVVKEGQYHKELGCFVRFISSGDIVSITENRGNQFDQLSYEGLAYPQYADWRKKASKFVSLWQITKKNKKKEIVTVEAKEKFDAICKYQPRLYKFNKEYAYLLRDIVRGKSLVELQQIRQEIFRFIEQDCGVTRLGSLSLSTLETVKAVKGIIYSYFSTALNASKNNPISDEQRKEFDPELFALLEKLELIRTRKKKQKVERIANSLIQTCLENNIKFIRGEGDLSTTNNATKKKANSRSMDWLARGVFNKIRQLAPMHNITLFGCGSLYTSHQDPLVHRNPDKAMKCRWAAIPVKDIGDWVLRKLSQNLRAKNIGTGEYYHQGVKEFLSHYELQDLEEELLKWRSDRKSNIPCWVLQNRLAEKLGNKEAVVYIPVRGGRIYFATHKVATGAVSIVFDQKQVWVCNADHVAAANIALTVKGIGEQSSDEENPDGSRIKLQLTS

SEQ ID NO: 246 - protein, 4 aa, synthetic construct
  REGION 1..4: note = synthetic peptide sequence
GGGS

SEQ ID NO: 247 - protein, 5 aa, synthetic construct
  REGION 1..5: note = synthetic peptide sequence
GGGGS

SEQ ID NO: 248 - protein, 5 aa, synthetic construct
  REGION 1..5: note = synthetic peptide sequence
EAAAK

SEQ ID NO: 249 - protein, 16 aa, synthetic construct
  REGION 1..16: note = synthetic peptide sequence
SGSETPGTSESATPES

SEQ ID NO: 250 - protein, 6 aa, synthetic construct
  REGION 1..6: note = linker peptide sequence
GGSGGS

SEQ ID NO: 251 - protein, 20 aa, synthetic construct
  REGION 1..20: note = synthetic peptide sequence
GSSGSETPGTSESATPESSG

SEQ ID NO: 252 - DNA, 18 bp, synthetic construct
  misc_feature 1..18: note = synthetic oligonucleotide sequence
  source 1..18: mol_type = other DNA
ggaggctctggaggaagc

SEQ ID NO: 253 - DNA, 60 bp, synthetic construct
  misc_feature 1..60: note = synthetic oligonucleotide sequence
  source 1..60: mol_type = other DNA
ggctcttctggatctgaaacacctggcacaagcgagagcgccacccctgagagctctggc

SEQ ID NO: 254 - protein, 1129 aa, Alicyclobacillus acidiphilus
  REGION 1..1129: note = MISC_FEATURE - AacCas12b polypeptide sequence
MAVKSMKVKLRLDNMPEIRAGLWKLHTEVNAGVRYYTEWLSLLRQENLYRRSPNGDGEQECYKTAEECKAELLERLRARQVENGHCGPAGSDDELLQLARQLYELLVPQAIGAKGDAQQIARKFLSPLADKDAVGGLGIAKAGNKPRWVRMREAGEPGWEEEKAKAEARKSTDRTADVLRALADFGLKPLMRVYTDSDMSSVQWKPLRKGQAVRTWDRDMFQQAIERMMSWESWNQRVGEAYAKLVEQKSRFEQKNFVGQEHLVQLVNQLQQDMKEASHGLESKEQTAHYLTGRALRGSDKVFEKWEKLDPDAPFDLYDTEIKNVQRRNTRRFGSHDLFAKLAEPKYQALWREDASFLTRYAVYNSIVRKLNHAKMFATFTLPDATAHPIWTRFDKLGGNLHQYTFLFNEFGEGRHAIRFQKLLTVEDGVAKEVDDVTVPISMSAQLDDLLPRDPHELVALYFQDYGAEQHLAGEFGGAKIQYRRDQLNHLHARRGARDVYLNLSVRVQSQSEARGERRPPYAAVFRLVGDNHRAFVHFDKLSDYLAEHPDDGKLGSEGLLSGLRVMSVDLGLRTSASISVFRVARKDELKPNSEGRVPFCFPIEGNENLVAVHERSQLLKLPGETESKDLRAIREERQRTLRQLRTQLAYLRLLVRCGSEDVGRRERSWAKLIEQPMDANQMTPDWREAFEDELQKLKSLYGICGDREWTEAVYESVRRVWRHMGKQVRDWRKDVRSGERPKIRGYQKDVVGGNSIEQIEYLERQYKFLKSWSFFGKVSGQVIRAEKGSRFAITLREHIDHAKEDRLKKLADRIIMEALGYVYALDDERGKGKWVAKYPPCQLILLEELSEYQFNNDRPPSENNQLMQWSHRGVFQELLNQAQVHDLLVGTMYAAFSSRFDARTGAPGIRCRRVPARCAREQNPEPFPWWLNKFVAEHKLDGCPLRADDLIPTGEGEFFVSPFSAEEGDFHQIHADLNAAQNLQRRLWSDFDISQIRLRCDWGEVDGEPVLIPRTTGKRTADSYGNKVFYTKTGVTYYERERGKKRRKVFAQEELSEEEAELLVEADEAREKSVVLMRDPSGIINRGDWTRQKEFWSMVNQRIEGYLVKQIRSRVRLQESACENTGDI

SEQ ID NO: 255 - protein, 1140 aa, Bacillus hisashii
  REGION 1..1140: note = MISC_FEATURE - BhCas12b polypeptide sequence
MAPKKKRKVGIHGVPAAATRSFILKIEPNEEVKKGLWKTHEVLNHGIAYYMNILKLIRQEAIYEHHEQDPKNPKKVSKAEIQAELWDFVLKMQKCNSFTHEVDKDEVFNILRELYEELVPSSVEKKGEANQLSNKFLYPLVDPNSQSGKGTASSGRKPRWYNLKIAGDPSWEEEKKKWEEDKKKDPLAKILGKLAEYGLIPLFIPYTDSNEPIVKEIKWMEKSRNQSVRRLDKDMFIQALERFLSWESWNLKVKEEYEKVEKEYKTLEERIKEDIQALKALEQYEKERQEQLLRDTLNTNEYRLSKRGLRGWREIIQKWLKMDENEPSEKYLEVFKDYQRKHPREAGDYSVYEFLSKKENHFIWRNHPEYPYLYATFCEIDKKKKDAKQQATFTLADPINHPLWVRFEERSGSNLNKYRILTEQLHTEKLKKKLTVQLDRLIYPTESGGWEEKGKVDIVLLPSRQFYNQIFLDIEEKGKHAFTYKDESIKFPLKGTLGGARVQFDRDHLRRYPHKVESGNVGRIYFNMTVNIEPTESPVSKSLKIHRDDFPKVVNFKPKELTEWIKDSKGKKLKSGIESLEIGLRVMSIDLGQRQAAAASIFEVVDQKPDIEGKLFFPIKGTELYAVHRASFNIKLPGETLVKSREVLRKAREDNLKLMNQKLNFLRNVLHFQQFEDITEREKRVTKWISRQENSDVPLVYQDELIQIRELMYKPYKDWVAFLKQLHKRLEVEIGKEVKHWRKSLSDGRKGLYGISLKNIDEIDRTRKFLLRWSLRPTEPGEVRRLEPGQRFAIDQLNHLNALKEDRLKKMANTIIMHALGYCYDVRKKKWQAKNPACQIILFEDLSNYNPYEERSRFENSKLMKWSRREIPRQVALQGEIYGLQVGEVGAQFSSRFHAKTGSPGIRCSVVTKEKLQDNRFFKNLQREGRLTLDKIAVLKEGDLYPDKGGEKFISLSKDRKCVTTHADINAAQNLQKRFWTRTHGFYKVYCKAYQVDGQTVYIPESKDQKQKIIEEFGEGYFILKDGVYEWVNAGKLKIKKGSSKQSSSELVDSDILKDSFDLASELKGEKLMLYRDPSGNVFPSDKWMAAGVFFGKLERILISKLTNQYSISTIEDDSSKQSMKRPAATKKAGQAKKKK

SEQ ID NO: 256 - protein, 1108 aa, Bacillus thermoamylovorans
  REGION 1..1108: note = MISC_FEATURE - BTCas12b polypeptide sequence
MATRSFILKIEPNEEVKKGLWKTHEVLNHGIAYYMNILKLIRQEAIYEHHEQDPKNPKKVSKAEIQAELWDFVLKMQKCNSFTHEVDKDVVFNILRELYEELVPSSVEKKGEANQLSNKFLYPLVDPNSQSGKGTASSGRKPRWYNLKIAGDPSWEEEKKKWEEDKKKDPLAKILGKLAEYGLIPLFIPFTDSNEPIVKEIKWMEKSRNQSVRRLDKDMFIQALERFLSWESWNLKVKEEYEKVEKEHKTLEERIKEDIQAFKSLEQYEKERQEQLLRDTLNTNEYRLSKRGLRGWREIIQKWLKMDENEPSEKYLEVFKDYQRKHPREAGDYSVYEFLSKKENHFIWRNHPEYPYLYATFCEIDKKKKDAKQQATFTLADPINHPLWVRFEERSGSNLNKYRILTEQLHTEKLKKKLTVQLDRLIYPTESGGWEEKGKVDIVLLPSRQFYNQIFLDIEEKGKHAFTYKDESIKFPLKGTLGGARVQFDRDHLRRYPHKVESGNVGRIYFNMTVNIEPTESPVSKSLKIHRDDFPKFVNFKPKELTEWIKDSKGKKLKSGIESLEIGLRVMSIDLGQRQAAAASIFEVVDQKPDIEGKLFFPIKGTELYAVHRASFNIKLPGETLVKSREVLRKAREDNLKLMNQKLNFLRNVLHFQQFEDITEREKRVTKWISRQENSDVPLVYQDELIQIRELMYKPYKDWVAFLKQLHKRLEVEIGKEVKHWRKSLSDGRKGLYGISLKNIDEIDRTRKFLLRWSLRPTEPGEVRRLEPGQRFAIDQLNHLNALKEDRLKKMANTIIMHALGYCYDVRKKKWQAKNPACQIILFEDLSNYNPYEERSRFENSKLMKWSRREIPRQVALQGEIYGLQVGEVGAQFSSRFHAKTGSPGIRCSVVTKEKLQDNRFFKNLQREGRLTLDKIAVLKEGDLYPDKGGEKFISLSKDRKLVTTHADINAAQNLQKRFWTRTHGFYKVYCKAYQVDGQTVYIPESKDQKQKIIEEFGEGYFILKDGVYEWGNAGKLKIKKGSSKQSSSELVDSDILKDSFDLASELKGEKLMLYRDPSGNVFPSDKWMAAGVFFGKLERILISKLTNQYSISTIEDDSSKQSM

SEQ ID NO: 257 - protein, 1112 aa, Bacillus sp.
  REGION 1..1112: note = MISC_FEATURE - BvCas12b (Bacillus sp. V3-13) polypeptide sequence
MAIRSIKLKMKTNSGTDSIYLRKALWRTHQLINEGIAYYMNLLTLYRQEAIGDKTKEAYQAELINIIRNQQRNNGSSEEHGSDQEILALLRQLYELIIPSSIGESGDANQLGNKFLYPLVDPNSQSGKGTSNAGRKPRWKRLKEEGNPDWELEKKKDEERKAKDPTVKIFDNLNKYGLLPLFPLFTNIQKDIEWLPLGKRQSVRKWDKDMFIQAIERLLSWESWNRRVADEYKQLKEKTESYYKEHLTGGEEWIEKIRKFEKERNMELEKNAFAPNDGYFITSRQIRGWDRVYEKWSKLPESASPEELWKVVAEQQNKMSEGFGDPKVFSFLANRENRDIWRGHSERIYHIAAYNGLQKKLSRTKEQATFTLPDAIEHPLWIRYESPGGTNLNLFKLEEKQKKNYYVTLSKIIWPSEEKWIEKENIEIPLAPSIQFNRQIKLKQHVKGKQEISFSDYSSRISLDGVLGGSRIQFNRKYIKNHKELLGEGDIGPVFFNLVVDVAPLQETRNGRLQSPIGKALKVISSDFSKVIDYKPKELMDWMNTGSASNSFGVASLLEGMRVMSIDMGQRTSASVSIFEVVKELPKDQEQKLFYSINDTELFAIHKRSFLLNLPGEVVTKNNKQQRQERRKKRQFVRSQIRMLANVLRLETKKTPDERKKAIHKLMEIVQSYDSWTASQKEVWEKELNLLTNMAAFNDEIWKESLVELHHRIEPYVGQIVSKWRKGLSEGRKNLAGISMWNIDELEDTRRLLISWSKRSRTPGEANRIETDEPFGSSLLQHIQNVKDDRLKQMANLIIMTALGFKYDKEEKDRYKRWKETYPACQIILFENLNRYLFNLDRSRRENSRLMKWAHRSIPRTVSMQGEMFGLQVGDVRSEYSSRFHAKTGAPGIRCHALTEEDLKAGSNTLKRLIEDGFINESELAYLKKGDIIPSQGGELFVTLSKRYKKDSDNNELTVIHADINAAQNLQKRFWQQNSEVYRVPCQLARMGEDKLYIPKSQTETIKKYFGKGSFVKNNTEQEVYKWEKSEKMKIKTDTTFDLQDLDGFEDISKTIELAQEQQKKYLTMFRDPSGYFFNNETWRPQKEYWSIVNNIIKSCLKKKILSNKVEL

SEQ ID NO: 258 - DNA, 47 bp, synthetic construct
  misc_feature 1..47: note = 5'UTR oligonucleotide sequence
  source 1..47: mol_type = other DNA
gggaaataagagagaaaagaagagtaagaagaaatataagagccacc

SEQ ID NO: 259 - DNA, 101 bp, synthetic construct
  misc_feature 1..101: note = 3'UTR (TriLink standard UTR)polynucleotide sequence
  source 1..101: mol_type = other DNA
gctggagcctcggtggccatgcttcttgccccttgggcctccccccagcccctcctccccttcctgcacccgtacccccgtggtctttgaataaagtctga

SEQ ID NO: 260 - DNA, 3420 bp, Bacillus hisashii
  misc_feature 1..3420: note = bhCas12b (V4) polynucleotide sequence
  source 1..3420: mol_type = genomic DNA
atggccccaaagaagaagcggaaggtcggtatccacggagtcccagcagccgccaccagatccttcatcctgaagatcgagcccaacgaggaagtgaagaaaggcctctggaaaacccacgaggtgctgaaccacggaatcgcctactacatgaatatcctgaagctgatccggcaagaggccatctacgagcaccacgagcaggaccccaagaatcccaagaaggtgtccaaggccgagatccaggccgagctgtgggatttcgtgctgaagatgcagaagtgcaacagcttcacacacgaggtggacaaggacgaggtgttcaacatcctgagagagctgtacgaggaactggtgcccagcagcgtggaaaagaagggcgaagccaaccagctgagcaacaagtttctgtaccctctggtggaccccaacagccagtctggaaagggaacagccagcagcggcagaaagcccagatggtacaacctgaagattgccggcgatccctcctgggaagaagagaagaagaagtgggaagaagataagaaaaaggacccgctggccaagatcctgggcaagctggctgagtacggactgatccctctgttcatcccctacaccgacagcaacgagcccatcgtgaaagaaatcaagtggatggaaaagtcccggaaccagagcgtgcggcggctggataaggacatgttcattcaggccctggaacggttcctgagctgggagagctggaacctgaaagtgaaagaggaatacgagaaggtcgagaaagagtacaagaccctggaagagaggatcaaagaggacatccaggctctgaaggctctggaacagtatgagaaagagcggcaagaacagctgctgcgggacaccctgaacaccaacgagtaccggctgagcaagagaggccttagaggctggcgggaaatcatccagaaatggctgaaaatggacgagaacgagccctccgagaagtacctggaagtgttcaaggactaccagcggaagcaccctagagaggccggcgattacagcgtgtacgagttcctgtccaagaaagagaaccacttcatctggcggaatcaccctgagtacccctacctgtacgccaccttctgcgagatcgacaagaaaaagaaggacgccaagcagcaggccaccttcacactggccgatcctatcaatcaccctctgtgggtccgattcgaggaaagaagcggcagcaacctgaacaagtacagaatcctgaccgagcagctgcacaccgagaagctgaagaaaaagctgacagtgcagctggaccggctgatctaccctacagaatctggcggctgggaagagaagggcaaagtggacattgtgctgctgcccagccggcagttctacaaccagatcttcctggacatcgaggaaaagggcaagcacgccttcacctacaaggatgagagcatcaagttccctctgaagggcacactcggcggagccagagtgcagttcgacagagatcacctgagaagataccctcacaaggtggaaagcggcaacgtgggcagaatctacttcaacatgaccgtgaacatcgagcctacagagtccccagtgtccaagtctctgaagatccaccgggacgacttccccaaggtggtcaacttcaagcccaaagaactgaccgagtggatcaaggacagcaagggcaagaaactgaagtccggcatcgagtccctggaaatcggcctgagagtgatgagcatcgacctgggacagagacaggccgctgccgcctctattttcgaggtggtggatcagaagcccgacatcgaaggcaagctgtttttcccaatcaagggcaccgagctgtatgccgtgcacagagccagcttcaacatcaagctgcccggcgagacactggtcaagagcagagaagtgctgcggaaggccagagaggacaatctgaaactgatgaaccagaagctcaacttcctgcggaacgtgctgcacttccagcagttcgaggacatcaccgagagagagaagcgggtcaccaagtggatcagcagacaagagaacagcgacgtgcccctggtgtaccaggatgagctgatccagatccgcgagctgatgtacaagccttacaaggactgggtcgccttcctgaagcagctccacaagagactggaagtcgagatcggcaaagaagtgaagcactggcggaagtccctgagcgacggaagaaagggcctgtacggcatctccctgaagaacatcgacgagatcgatcggacccggaagttcctgctgagatggtccctgaggcctaccgaacctggcgaagtgcgtagactggaacccggccagagattcgccatcgaccagctgaatcacctgaacgccctgaaagaagatcggctgaagaagatggccaacaccatcatcatgcacgccctgggctactgctacgacgtgcggaagaagaaatggcaggctaagaaccccgcctgccagatcatcctgttcgaggatctgagcaactacaacccctacgaggaaaggtcccgcttcgagaacagcaagctcatgaagtggtccagacgcgagatccccagacaggttgcactgcagggcgagatctatggcctgcaagtgggagaagtgggcgctcagttcagcagcagattccacgccaagacaggcagccctggcatcagatgtagcgtcgtgaccaaagagaagctgcaggacaatcggttcttcaagaatctgcagagagagggcagactgaccctggacaaaatcgccgtgctgaaagagggcgatctgtacccagacaaaggcggcgagaagttcatcagcctgagcaaggatcggaagtgcgtgaccacacacgccgacatcaacgccgctcagaacctgcagaagcggttctggacaagaacccacggcttctacaaggtgtactgcaaggcctaccaggtggacggccagaccgtgtacatccctgagagcaaggaccagaagcagaagatcatcgaagagttcggcgagggctacttcattctgaaggacggggtgtacgaatgggtcaacgccggcaagctgaaaatcaagaagggcagctccaagcagagcagcagcgagctggtggatagcgacatcctgaaagacagcttcgacctggcctccgagctgaaaggcgaaaagctgatgctgtacagggaccccagcggcaatgtgttccccagcgacaaatggatggccgctggcgtgttcttcggaaagctggaacgcatcctgatcagcaagctgaccaaccagtactccatcagcaccatcgaggacgacagcagcaagcagtctatgaaaaggccggcggccacgaaaaaggccggccaggcaaaaaagaaaaag

SEQ ID NO: 261 - protein, 17 aa, synthetic construct
  REGION 1..17: note = synthetic peptide sequence
MAPKKKRKVGIHGVPAA

SEQ ID NO: 262 - DNA, 51 bp, synthetic construct
  misc_feature 1..51: note = synthetic oligonucleotide sequence
  source 1..51: mol_type = other DNA
atggccccaaagaagaagcggaaggtcggtatccacggagtcccagcagcc

SEQ ID NO: 263 - protein, 1554 aa, synthetic construct
  REGION 1..1554: note = 101 Cas9 TadAins 1015 polypeptide sequence
MDKKYSIGLAIGTNSVGWAVITDEYKVPSKKFKVLGNTDRHSIKKNLIGALLFDSGETAEATRLKRTARRRYTRRKNRICYLQEIFSNEMAKVDDSFFHRLEESFLVEEDKKHERHPIFGNIVDEVAYHEKYPTIYHLRKKLVDSTDKADLRLIYLALAHMIKFRGHFLIEGDLNPDNSDVDKLFIQLVQTYNQLFEENPINASGVDAKAILSARLSKSRRLENLIAQLPGEKKNGLFGNLIALSLGLTPNFKSNFDLAEDAKLQLSKDTYDDDLDNLLAQIGDQYADLFLAAKNLSDAILLSDILRVNTEITKAPLSASMIKRYDEHHQDLTLLKALVRQQLPEKYKEIFFDQSKNGYAGYIDGGASQEEFYKFIKPILEKMDGTEELLVKLNREDLLRKQRTFDNGSIPHQIHLGELHAILRRQEDFYPFLKDNREKIEKILTFRIPYYVGPLARGNSRFAWMTRKSEETITPWNFEEVVDKGASAQSFIERMTNFDKNLPNEKVLPKHSLLYEYFTVYNELTKVKYVTEGMRKPAFLSGEQKKAIVDLLFKTNRKVTVKQLKEDYFKKIECFDSVEISGVEDRFNASLGTYHDLLKIIKDKDFLDNEENEDILEDIVLTLTLFEDREMIEERLKTYAHLFDDKVMKQLKRRRYTGWGRLSRKLINGIRDKQSGKTILDFLKSDGFANRNFMQLIHDDSLTFKEDIQKAQVSGQGDSLHEHIANLAGSPAIKKGILQTVKVVDELVKVMGRHKPENIVIEMARENQTTQKGQKNSRERMKRIEEGIKELGSQILKEHPVENTQLQNEKLYLYYLQNGRDMYVDQELDINRLSDYDVDHIVPQSFLKDDSIDNKVLTRSDKNRGKSDNVPSEEVVKKMKNYWRQLLNAKLITQRKFDNLTKAERGGLSELDKAGFIKRQLVETRQITKHVAQILDSRMNTKYDENDKLIREVKVITLKSKLVSDFRKDFQFYKVREINNYHHAHDAYLNAVVGTALIKKYPKLESEFVYGDYKVGSSGSETPGTSESATPESSGSEVEFSHEYWMRHALTLAKRARDEREVPVGAVLVLNNRVIGEGWNRAIGLHDPTAHAEIMALRQGGLVMQNYRLIDATLYVTFEPCVMCAGAMIHSRIGRVVFGVRNAKTGAAGSLMDVLHYPGMNHRVEITEGILADECAALLCYFFRMPRQVFNAQKKAQSSTDYDVRKMIAKSEQEIGKATAKYFFYSNIMNFFKTEITLANGEIRKRPLIETNGETGEIVWDKGRDFATVRKVLSMPQVNIVKKTEVQTGGFSKESILPKRNSDKLIARKKDWDPKKYGGFDSPTVAYSVLVVAKVEKGKSKKLKSVKELLGITIMERSSFEKNPIDFLEAKGYKEVKKDLIIKLPKYSLFELENGRKRMLASAGELQKGNELALPSKYVNFLYLASHYEKLKGSPEDNEQKQLFVEQHKHYLDEIIEQISEFSKRVILADANLDKVLSAYNKHRDKPIREQAENIIHLFTLTNLGAPAAFKYFDTTIDRKRYTSTKEVLDATLIHQSITGLYETRIDLSQLGGD

SEQ ID NO: 264 - protein, 1554 aa, synthetic construct
  REGION 1..1554: note = 102 Cas9 TadAins 1022 polypeptide sequence
MDKKYSIGLAIGTNSVGWAVITDEYKVPSKKFKVLGNTDRHSIKKNLIGALLFDSGETAEATRLKRTARRRYTRRKNRICYLQEIFSNEMAKVDDSFFHRLEESFLVEEDKKHERHPIFGNIVDEVAYHEKYPTIYHLRKKLVDSTDKADLRLIYLALAHMIKFRGHFLIEGDLNPDNSDVDKLFIQLVQTYNQLFEENPINASGVDAKAILSARLSKSRRLENLIAQLPGEKKNGLFGNLIALSLGLTPNFKSNFDLAEDAKLQLSKDTYDDDLDNLLAQIGDQYADLFLAAKNLSDAILLSDILRVNTEITKAPLSASMIKRYDEHHQDLTLLKALVRQQLPEKYKEIFFDQSKNGYAGYIDGGASQEEFYKFIKPILEKMDGTEELLVKLNREDLLRKQRTFDNGSIPHQIHLGELHAILRRQEDFYPFLKDNREKIEKILTFRIPYYVGPLARGNSRFAWMTRKSEETITPWNFEEVVDKGASAQSFIERMTNFDKNLPNEKVLPKHSLLYEYFTVYNELTKVKYVTEGMRKPAFLSGEQKKAIVDLLFKTNRKVTVKQLKEDYFKKIECFDSVEISGVEDRFNASLGTYHDLLKIIKDKDFLDNEENEDILEDIVLTLTLFEDREMIEERLKTYAHLFDDKVMKQLKRRRYTGWGRLSRKLINGIRDKQSGKTILDFLKSDGFANRNFMQLIHDDSLTFKEDIQKAQVSGQGDSLHEHIANLAGSPAIKKGILQTVKVVDELVKVMGRHKPENIVIEMARENQTTQKGQKNSRERMKRIEEGIKELGSQILKEHPVENTQLQNEKLYLYYLQNGRDMYVDQELDINRLSDYDVDHIVPQSFLKDDSIDNKVLTRSDKNRGKSDNVPSEEVVKKMKNYWRQLLNAKLITQRKFDNLTKAERGGLSELDKAGFIKRQLVETRQITKHVAQILDSRMNTKYDENDKLIREVKVITLKSKLVSDFRKDFQFYKVREINNYHHAHDAYLNAVVGTALIKKYPKLESEFVYGDYKVYDVRKMIGSSGSETPGTSESATPESSGSEVEFSHEYWMRHALTLAKRARDEREVPVGAVLVLNNRVIGEGWNRAIGLHDPTAHAEIMALRQGGLVMQNYRLIDATLYVTFEPCVMCAGAMIHSRIGRVVFGVRNAKTGAAGSLMDVLHYPGMNHRVEITEGILADECAALLCYFFRMPRQVFNAQKKAQSSTDAKSEQEIGKATAKYFFYSNIMNFFKTEITLANGEIRKRPLIETNGETGEIVWDKGRDFATVRKVLSMPQVNIVKKTEVQTGGFSKESILPKRNSDKLIARKKDWDPKKYGGFDSPTVAYSVLVVAKVEKGKSKKLKSVKELLGITIMERSSFEKNPIDFLEAKGYKEVKKDLIIKLPKYSLFELENGRKRMLASAGELQKGNELALPSKYVNFLYLASHYEKLKGSPEDNEQKQLFVEQHKHYLDEIIEQISEFSKRVILADANLDKVLSAYNKHRDKPIREQAENIIHLFTLTNLGAPAAFKYFDTTIDRKRYTSTKEVLDATLIHQSITGLYETRIDLSQLGGD

SEQ ID NO: 265 - protein, 1554 aa, synthetic construct
  REGION 1..1554: note = 103 Cas9 TadAins 1029 polypeptide sequence
MDKKYSIGLAIGTNSVGWAVITDEYKVPSKKFKVLGNTDRHSIKKNLIGALLFDSGETAEATRLKRTARRRYTRRKNRICYLQEIFSNEMAKVDDSFFHRLEESFLVEEDKKHERHPIFGNIVDEVAYHEKYPTIYHLRKKLVDSTDKADLRLIYLALAHMIKFRGHFLIEGDLNPDNSDVDKLFIQLVQTYNQLFEENPINASGVDAKAILSARLSKSRRLENLIAQLPGEKKNGLFGNLIALSLGLTPNFKSNFDLAEDAKLQLSKDTYDDDLDNLLAQIGDQYADLFLAAKNLSDAILLSDILRVNTEITKAPLSASMIKRYDEHHQDLTLLKALVRQQLPEKYKEIFFDQSKNGYAGYIDGGASQEEFYKFIKPILEKMDGTEELLVKLNREDLLRKQRTFDNGSIPHQIHLGELHAILRRQEDFYPFLKDNREKIEKILTFRIPYYVGPLARGNSRFAWMTRKSEETITPWNFEEVVDKGASAQSFIERMTNFDKNLPNEKVLPKHSLLYEYFTVYNELTKVKYVTEGMRKPAFLSGEQKKAIVDLLFKTNRKVTVKQLKEDYFKKIECFDSVEISGVEDRFNASLGTYHDLLKIIKDKDFLDNEENEDILEDIVLTLTLFEDREMIEERLKTYAHLFDDKVMKQLKRRRYTGWGRLSRKLINGIRDKQSGKTILDFLKSDGFANRNFMQLIHDDSLTFKEDIQKAQVSGQGDSLHEHIANLAGSPAIKKGILQTVKVVDELVKVMGRHKPENIVIEMARENQTTQKGQKNSRERMKRIEEGIKELGSQILKEHPVENTQLQNEKLYLYYLQNGRDMYVDQELDINRLSDYDVDHIVPQSFLKDDSIDNKVLTRSDKNRGKSDNVPSEEVVKKMKNYWRQLLNAKLITQRKFDNLTKAERGGLSELDKAGFIKRQLVETRQITKHVAQILDSRMNTKYDENDKLIREVKVITLKSKLVSDFRKDFQFYKVREINNYHHAHDAYLNAVVGTALIKKYPKLESEFVYGDYKVYDVRKMIAKSEQEIGSSGSETPGTSESATPESSGSEVEFSHEYWMRHALTLAKRARDEREVPVGAVLVLNNRVIGEGWNRAIGLHDPTAHAEIMALRQGGLVMQNYRLIDATLYVTFEPCVMCAGAMIHSRIGRVVFGVRNAKTGAAGSLMDVLHYPGMNHRVEITEGILADECAALLCYFFRMPRQVFNAQKKAQSSTDGKATAKYFFYSNIMNFFKTEITLANGEIRKRPLIETNGETGEIVWDKGRDFATVRKVLSMPQVNIVKKTEVQTGGFSKESILPKRNSDKLIARKKDWDPKKYGGFDSPTVAYSVLVVAKVEKGKSKKLKSVKELLGITIMERSSFEKNPIDFLEAKGYKEVKKDLIIKLPKYSLFELENGRKRMLASAGELQKGNELALPSKYVNFLYLASHYEKLKGSPEDNEQKQLFVEQHKHYLDEIIEQISEFSKRVILADANLDKVLSAYNKHRDKPIREQAENIIHLFTLTNLGAPAAFKYFDTTIDRKRYTSTKEVLDATLIHQSITGLYETRIDLSQLGGD

SEQ ID NO: 266 - protein, 1554 aa, synthetic construct
  REGION 1..1554: note = 103 Cas9 TadAins 1040 polypeptide sequence
MDKKYSIGLAIGTNSVGWAVITDEYKVPSKKFKVLGNTDRHSIKKNLIGALLFDSGETAEATRLKRTARRRYTRRKNRICYLQEIFSNEMAKVDDSFFHRLEESFLVEEDKKHERHPIFGNIVDEVAYHEKYPTIYHLRKKLVDSTDKADLRLIYLALAHMIKFRGHFLIEGDLNPDNSDVDKLFIQLVQTYNQLFEENPINASGVDAKAILSARLSKSRRLENLIAQLPGEKKNGLFGNLIALSLGLTPNFKSNFDLAEDAKLQLSKDTYDDDLDNLLAQIGDQYADLFLAAKNLSDAILLSDILRVNTEITKAPLSASMIKRYDEHHQDLTLLKALVRQQLPEKYKEIFFDQSKNGYAGYIDGGASQEEFYKFIKPILEKMDGTEELLVKLNREDLLRKQRTFDNGSIPHQIHLGELHAILRRQEDFYPFLKDNREKIEKILTFRIPYYVGPLARGNSRFAWMTRKSEETITPWNFEEVVDKGASAQSFIERMTNFDKNLPNEKVLPKHSLLYEYFTVYNELTKVKYVTEGMRKPAFLSGEQKKAIVDLLFKTNRKVTVKQLKEDYFKKIECFDSVEISGVEDRFNASLGTYHDLLKIIKDKDFLDNEENEDILEDIVLTLTLFEDREMIEERLKTYAHLFDDKVMKQLKRRRYTGWGRLSRKLINGIRDKQSGKTILDFLKSDGFANRNFMQLIHDDSLTFKEDIQKAQVSGQGDSLHEHIANLAGSPAIKKGILQTVKVVDELVKVMGRHKPENIVIEMARENQTTQKGQKNSRERMKRIEEGIKELGSQILKEHPVENTQLQNEKLYLYYLQNGRDMYVDQELDINRLSDYDVDHIVPQSFLKDDSIDNKVLTRSDKNRGKSDNVPSEEVVKKMKNYWRQLLNAKLITQRKFDNLTKAERGGLSELDKAGFIKRQLVETRQITKHVAQILDSRMNTKYDENDKLIREVKVITLKSKLVSDFRKDFQFYKVREINNYHHAHDAYLNAVVGTALIKKYPKLESEFVYGDYKVYDVRKMIAKSEQEIGKATAKYFFYSGSSGSETPGTSESATPESSGSEVEFSHEYWMRHALTLAKRARDEREVPVGAVLVLNNRVIGEGWNRAIGLHDPTAHAEIMALRQGGLVMQNYRLIDATLYVTFEPCVMCAGAMIHSRIGRVVFGVRNAKTGAAGSLMDVLHYPGMNHRVEITEGILADECAALLCYFFRMPRQVFNAQKKAQSSTDNIMNFFKTEITLANGEIRKRPLIETNGETGEIVWDKGRDFATVRKVLSMPQVNIVKKTEVQTGGFSKESILPKRNSDKLIARKKDWDPKKYGGFDSPTVAYSVLVVAKVEKGKSKKLKSVKELLGITIMERSSFEKNPIDFLEAKGYKEVKKDLIIKLPKYSLFELENGRKRMLASAGELQKGNELALPSKYVNFLYLASHYEKLKGSPEDNEQKQLFVEQHKHYLDEIIEQISEFSKRVILADANLDKVLSAYNKHRDKPIREQAENIIHLFTLTNLGAPAAFKYFDTTIDRKRYTSTKEVLDATLIHQSITGLYETRIDLSQLGGD

SEQ ID NO: 267 - protein, 1554 aa, synthetic construct
  REGION 1..1554: note = 105 Cas9 TadAins 1068 polypeptide sequence
MDKKYSIGLAIGTNSVGWAVITDEYKVPSKKFKVLGNTDRHSIKKNLIGALLFDSGETAEATRLKRTARRRYTRRKNRICYLQEIFSNEMAKVDDSFFHRLEESFLVEEDKKHERHPIFGNIVDEVAYHEKYPTIYHLRKKLVDSTDKADLRLIYLALAHMIKFRGHFLIEGDLNPDNSDVDKLFIQLVQTYNQLFEENPINASGVDAKAILSARLSKSRRLENLIAQLPGEKKNGLFGNLIALSLGLTPNFKSNFDLAEDAKLQLSKDTYDDDLDNLLAQIGDQYADLFLAAKNLSDAILLSDILRVNTEITKAPLSASMIKRYDEHHQDLTLLKALVRQQLPEKYKEIFFDQSKNGYAGYIDGGASQEEFYKFIKPILEKMDGTEELLVKLNREDLLRKQRTFDNGSIPHQIHLGELHAILRRQEDFYPFLKDNREKIEKILTFRIPYYVGPLARGNSRFAWMTRKSEETITPWNFEEVVDKGASAQSFIERMTNFDKNLPNEKVLPKHSLLYEYFTVYNELTKVKYVTEGMRKPAFLSGEQKKAIVDLLFKTNRKVTVKQLKEDYFKKIECFDSVEISGVEDRFNASLGTYHDLLKIIKDKDFLDNEENEDILEDIVLTLTLFEDREMIEERLKTYAHLFDDKVMKQLKRRRYTGWGRLSRKLINGIRDKQSGKTILDFLKSDGFANRNFMQLIHDDSLTFKEDIQKAQVSGQGDSLHEHIANLAGSPAIKKGILQTVKVVDELVKVMGRHKPENIVIEMARENQTTQKGQKNSRERMKRIEEGIKELGSQILKEHPVENTQLQNEKLYLYYLQNGRDMYVDQELDINRLSDYDVDHIVPQSFLKDDSIDNKVLTRSDKNRGKSDNVPSEEVVKKMKNYWRQLLNAKLITQRKFDNLTKAERGGLSELDKAGFIKRQLVETRQITKHVAQILDSRMNTKYDENDKLIREVKVITLKSKLVSDFRKDFQFYKVREINNYHHAHDAYLNAVVGTALIKKYPKLESEFVYGDYKVYDVRKMIAKSEQEIGKATAKYFFYSNIMNFFKTEITLANGEIRKRPLIETNGEGSSGSETPGTSESATPESSGSEVEFSHEYWMRHALTLAKRARDEREVPVGAVLVLNNRVIGEGWNRAIGLHDPTAHAEIMALRQGGLVMQNYRLIDATLYVTFEPCVMCAGAMIHSRIGRVVFGVRNAKTGAAGSLMDVLHYPGMNHRVEITEGILADECAALLCYFFRMPRQVFNAQKKAQSSTDTGEIVWDKGRDFATVRKVLSMPQVNIVKKTEVQTGGFSKESILPKRNSDKLIARKKDWDPKKYGGFDSPTVAYSVLVVAKVEKGKSKKLKSVKELLGITIMERSSFEKNPIDFLEAKGYKEVKKDLIIKLPKYSLFELENGRKRMLASAGELQKGNELALPSKYVNFLYLASHYEKLKGSPEDNEQKQLFVEQHKHYLDEIIEQISEFSKRVILADANLDKVLSAYNKHRDKPIREQAENIIHLFTLTNLGAPAAFKYFDTTIDRKRYTSTKEVLDATLIHQSITGLYETRIDLSQLGGD

SEQ ID NO: 268 - protein, 1554 aa, synthetic construct
  REGION 1..1554: note = 106 Cas9 TadAins 1247 polypeptide sequence
MDKKYSIGLAIGTNSVGWAVITDEYKVPSKKFKVLGNTDRHSIKKNLIGALLFDSGETAEATRLKRTARRRYTRRKNRICYLQEIFSNEMAKVDDSFFHRLEESFLVEEDKKHERHPIFGNIVDEVAYHEKYPTIYHLRKKLVDSTDKADLRLIYLALAHMIKFRGHFLIEGDLNPDNSDVDKLFIQLVQTYNQLFEENPINASGVDAKAILSARLSKSRRLENLIAQLPGEKKNGLFGNLIALSLGLTPNFKSNFDLAEDAKLQLSKDTYDDDLDNLLAQIGDQYADLFLAAKNLSDAILLSDILRVNTEITKAPLSASMIKRYDEHHQDLTLLKALVRQQLPEKYKEIFFDQSKNGYAGYIDGGASQEEFYKFIKPILEKMDGTEELLVKLNREDLLRKQRTFDNGSIPHQIHLGELHAILRRQEDFYPFLKDNREKIEKILTFRIPYYVGPLARGNSRFAWMTRKSEETITPWNFEEVVDKGASAQSFIERMTNFDKNLPNEKVLPKHSLLYEYFTVYNELTKVKYVTEGMRKPAFLSGEQKKAIVDLLFKTNRKVTVKQLKEDYFKKIECFDSVEISGVEDRFNASLGTYHDLLKIIKDKDFLDNEENEDILEDIVLTLTLFEDREMIEERLKTYAHLFDDKVMKQLKRRRYTGWGRLSRKLINGIRDKQSGKTILDFLKSDGFANRNFMQLIHDDSLTFKEDIQKAQVSGQGDSLHEHIANLAGSPAIKKGILQTVKVVDELVKVMGRHKPENIVIEMARENQTTQKGQKNSRERMKRIEEGIKELGSQILKEHPVENTQLQNEKLYLYYLQNGRDMYVDQELDINRLSDYDVDHIVPQSFLKDDSIDNKVLTRSDKNRGKSDNVPSEEVVKKMKNYWRQLLNAKLITQRKFDNLTKAERGGLSELDKAGFIKRQLVETRQITKHVAQILDSRMNTKYDENDKLIREVKVITLKSKLVSDFRKDFQFYKVREINNYHHAHDAYLNAVVGTALIKKYPKLESEFVYGDYKVYDVRKMIAKSEQEIGKATAKYFFYSNIMNFFKTEITLANGEIRKRPLIETNGETGEIVWDKGRDFATVRKVLSMPQVNIVKKTEVQTGGFSKESILPKRNSDKLIARKKDWDPKKYGGFDSPTVAYSVLVVAKVEKGKSKKLKSVKELLGITIMERSSFEKNPIDFLEAKGYKEVKKDLIIKLPKYSLFELENGRKRMLASAGELQKGNELALPSKYVNFLYLASHYEKLKGGSSGSETPGTSESATPESSGSEVEFSHEYWMRHALTLAKRARDEREVPVGAVLVLNNRVIGEGWNRAIGLHDPTAHAEIMALRQGGLVMQNYRLIDATLYVTFEPCVMCAGAMIHSRIGRVVFGVRNAKTGAAGSLMDVLHYPGMNHRVEITEGILADECAALLCYFFRMPRQVFNAQKKAQSSTDSPEDNEQKQLFVEQHKHYLDEIIEQISEFSKRVILADANLDKVLSAYNKHRDKPIREQAENIIHLFTLTNLGAPAAFKYFDTTIDRKRYTSTKEVLDATLIHQSITGLYETRIDLSQLGGD

SEQ ID NO: 269 - protein, 1554 aa, synthetic construct
  REGION 1..1554: note = 107 Cas9 TadAins 1054 polypeptide sequence
MDKKYSIGLAIGTNSVGWAVITDEYKVPSKKFKVLGNTDRHSIKKNLIGALLFDSGETAEATRLKRTARRRYTRRKNRICYLQEIFSNEMAKVDDSFFHRLEESFLVEEDKKHERHPIFGNIVDEVAYHEKYPTIYHLRKKLVDSTDKADLRLIYLALAHMIKFRGHFLIEGDLNPDNSDVDKLFIQLVQTYNQLFEENPINASGVDAKAILSARLSKSRRLENLIAQLPGEKKNGLFGNLIALSLGLTPNFKSNFDLAEDAKLQLSKDTYDDDLDNLLAQIGDQYADLFLAAKNLSDAILLSDILRVNTEITKAPLSASMIKRYDEHHQDLTLLKALVRQQLPEKYKEIFFDQSKNGYAGYIDGGASQEEFYKFIKPILEKMDGTEELLVKLNREDLLRKQRTFDNGSIPHQIHLGELHAILRRQEDFYPFLKDNREKIEKILTFRIPYYVGPLARGNSRFAWMTRKSEETITPWNFEEVVDKGASAQSFIERMTNFDKNLPNEKVLPKHSLLYEYFTVYNELTKVKYVTEGMRKPAFLSGEQKKAIVDLLFKTNRKVTVKQLKEDYFKKIECFDSVEISGVEDRFNASLGTYHDLLKIIKDKDFLDNEENEDILEDIVLTLTLFEDREMIEERLKTYAHLFDDKVMKQLKRRRYTGWGRLSRKLINGIRDKQSGKTILDFLKSDGFANRNFMQLIHDDSLTFKEDIQKAQVSGQGDSLHEHIANLAGSPAIKKGILQTVKVVDELVKVMGRHKPENIVIEMARENQTTQKGQKNSRERMKRIEEGIKELGSQILKEHPVENTQLQNEKLYLYYLQNGRDMYVDQELDINRLSDYDVDHIVPQSFLKDDSIDNKVLTRSDKNRGKSDNVPSEEVVKKMKNYWRQLLNAKLITQRKFDNLTKAERGGLSELDKAGFIKRQLVETRQITKHVAQILDSRMNTKYDENDKLIREVKVITLKSKLVSDFRKDFQFYKVREINNYHHAHDAYLNAVVGTALIKKYPKLESEFVYGDYKVYDVRKMIAKSEQEIGKATAKYFFYSNIMNFFKTEITLANGSSGSETPGTSESATPESSGSEVEFSHEYWMRHALTLAKRARDEREVPVGAVLVLNNRVIGEGWNRAIGLHDPTAHAEIMALRQGGLVMQNYRLIDATLYVTFEPCVMCAGAMIHSRIGRVVFGVRNAKTGAAGSLMDVLHYPGMNHRVEITEGILADECAALLCYFFRMPRQVFNAQKKAQSSTDGEIRKRPLIETNGETGEIVWDKGRDFATVRKVLSMPQVNIVKKTEVQTGGFSKESILPKRNSDKLIARKKDWDPKKYGGFDSPTVAYSVLVVAKVEKGKSKKLKSVKELLGITIMERSSFEKNPIDFLEAKGYKEVKKDLIIKLPKYSLFELENGRKRMLASAGELQKGNELALPSKYVNFLYLASHYEKLKGSPEDNEQKQLFVEQHKHYLDEIIEQISEFSKRVILADANLDKVLSAYNKHRDKPIREQAENIIHLFTLTNLGAPAAFKYFDTTIDRKRYTSTKEVLDATLIHQSITGLYETRIDLSQLGGD

SEQ ID NO: 270 - protein, 1554 aa, synthetic construct
  REGION 1..1554: note = 108 Cas9 TadAins 1026 polypeptide sequence
MDKKYSIGLAIGTNSVGWAVITDEYKVPSKKFKVLGNTDRHSIKKNLIGALLFDSGETAEATRLKRTARRRYTRRKNRICYLQEIFSNEMAKVDDSFFHRLEESFLVEEDKKHERHPIFGNIVDEVAYHEKYPTIYHLRKKLVDSTDKADLRLIYLALAHMIKFRGHFLIEGDLNPDNSDVDKLFIQLVQTYNQLFEENPINASGVDAKAILSARLSKSRRLENLIAQLPGEKKNGLFGNLIALSLGLTPNFKSNFDLAEDAKLQLSKDTYDDDLDNLLAQIGDQYADLFLAAKNLSDAILLSDILRVNTEITKAPLSASMIKRYDEHHQDLTLLKALVRQQLPEKYKEIFFDQSKNGYAGYIDGGASQEEFYKFIKPILEKMDGTEELLVKLNREDLLRKQRTFDNGSIPHQIHLGELHAILRRQEDFYPFLKDNREKIEKILTFRIPYYVGPLARGNSRFAWMTRKSEETITPWNFEEVVDKGASAQSFIERMTNFDKNLPNEKVLPKHSLLYEYFTVYNELTKVKYVTEGMRKPAFLSGEQKKAIVDLLFKTNRKVTVKQLKEDYFKKIECFDSVEISGVEDRFNASLGTYHDLLKIIKDKDFLDNEENEDILEDIVLTLTLFEDREMIEERLKTYAHLFDDKVMKQLKRRRYTGWGRLSRKLINGIRDKQSGKTILDFLKSDGFANRNFMQLIHDDSLTFKEDIQKAQVSGQGDSLHEHIANLAGSPAIKKGILQTVKVVDELVKVMGRHKPENIVIEMARENQTTQKGQKNSRERMKRIEEGIKELGSQILKEHPVENTQLQNEKLYLYYLQNGRDMYVDQELDINRLSDYDVDHIVPQSFLKDDSIDNKVLTRSDKNRGKSDNVPSEEVVKKMKNYWRQLLNAKLITQRKFDNLTKAERGGLSELDKAGFIKRQLVETRQITKHVAQILDSRMNTKYDENDKLIREVKVITLKSKLVSDFRKDFQFYKVREINNYHHAHDAYLNAVVGTALIKKYPKLESEFVYGDYKVYDVRKMIAKSEGSSGSETPGTSESATPESSGSEVEFSHEYWMRHALTLAKRARDEREVPVGAVLVLNNRVIGEGWNRAIGLHDPTAHAEIMALRQGGLVMQNYRLIDATLYVTFEPCVMCAGAMIHSRIGRVVFGVRNAKTGAAGSLMDVLHYPGMNHRVEITEGILADECAALLCYFFRMPRQVFNAQKKAQSSTDQEIGKATAKYFFYSNIMNFFKTEITLANGEIRKRPLIETNGETGEIVWDKGRDFATVRKVLSMPQVNIVKKTEVQTGGFSKESILPKRNSDKLIARKKDWDPKKYGGFDSPTVAYSVLVVAKVEKGKSKKLKSVKELLGITIMERSSFEKNPIDFLEAKGYKEVKKDLIIKLPKYSLFELENGRKRMLASAGELQKGNELALPSKYVNFLYLASHYEKLKGSPEDNEQKQLFVEQHKHYLDEIIEQISEFSKRVILADANLDKVLSAYNKHRDKPIREQAENIIHLFTLTNLGAPAAFKYFDTTIDRKRYTSTKEVLDATLIHQSITGLYETRIDLSQLGGD

SEQ ID NO: 271 - protein, 1540 aa, synthetic construct
  REGION 1..1540: note = 109 Cas9 TadAins 768 polypeptide sequence
MDKKYSIGLAIGTNSVGWAVITDEYKVPSKKFKVLGNTDRHSIKKNLIGALLFDSGETAEATRLKRTARRRYTRRKNRICYLQEIFSNEMAKVDDSFFHRLEESFLVEEDKKHERHPIFGNIVDEVAYHEKYPTIYHLRKKLVDSTDKADLRLIYLALAHMIKFRGHFLIEGDLNPDNSDVDKLFIQLVQTYNQLFEENPINASGVDAKAILSARLSKSRRLENLIAQLPGEKKNGLFGNLIALSLGLTPNFKSNFDLAEDAKLQLSKDTYDDDLDNLLAQIGDQYADLFLAAKNLSDAILLSDILRVNTEITKAPLSASMIKRYDEHHQDLTLLKALVRQQLPEKYKEIFFDQSKNGYAGYIDGGASQEEFYKFIKPILEKMDGTEELLVKLNREDLLRKQRTFDNGSIPHQIHLGELHAILRRQEDFYPFLKDNREKIEKILTFRIPYYVGPLARGNSRFAWMTRKSEETITPWNFEEVVDKGASAQSFIERMTNFDKNLPNEKVLPKHSLLYEYFTVYNELTKVKYVTEGMRKPAFLSGEQKKAIVDLLFKTNRKVTVKQLKEDYFKKIECFDSVEISGVEDRFNASLGTYHDLLKIIKDKDFLDNEENEDILEDIVLTLTLFEDREMIEERLKTYAHLFDDKVMKQLKRRRYTGWGRLSRKLINGIRDKQSGKTILDFLKSDGFANRNFMQLIHDDSLTFKEDIQKAQVSGQGDSLHEHIANLAGSPAIKKGILQTVKVVDELVKVMGRHKPENIVIEMARENQGSSGSETPGTSESATPESSGSEVEFSHEYWMRHALTLAKRARDEREVPVGAVLVLNNRVIGEGWNRAIGLHDPTAHAEIMALRQGGLVMQNYRLIDATLYVTFEPCVMCAGAMIHSRIGRVVFGVRNAKTGAAGSLMDVLHYPGMNHRVEITEGILADECAALLCYFFRMPRTTQKGQKNSRERMKRIEEGIKELGSQILKEHPVENTQLQNEKLYLYYLQNGRDMYVDQELDINRLSDYDVDHIVPQSFLKDDSIDNKVLTRSDKNRGKSDNVPSEEVVKKMKNYWRQLLNAKLITQRKFDNLTKAERGGLSELDKAGFIKRQLVETRQITKHVAQILDSRMNTKYDENDKLIREVKVITLKSKLVSDFRKDFQFYKVREINNYHHAHDAYLNAVVGTALIKKYPKLESEFVYGDYKVYDVRKMIAKSEQEIGKATAKYFFYSNIMNFFKTEITLANGEIRKRPLIETNGETGEIVWDKGRDFATVRKVLSMPQVNIVKKTEVQTGGFSKESILPKRNSDKLIARKKDWDPKKYGGFDSPTVAYSVLVVAKVEKGKSKKLKSVKELLGITIMERSSFEKNPIDFLEAKGYKEVKKDLIIKLPKYSLFELENGRKRMLASAGELQKGNELALPSKYVNFLYLASHYEKLKGSPEDNEQKQLFVEQHKHYLDEIIEQISEFSKRVILADANLDKVLSAYNKHRDKPIREQAENIIHLFTLTNLGAPAAFKYFDTTIDRKRYTSTKEVLDATLIHQSITGLYETRIDLSQLGGD

SEQ ID NO: 272 - protein, 1540 aa, synthetic construct
  REGION 1..1540: note = 110.1 Cas9 TadAins 1250 polypeptide sequence
MDKKYSIGLAIGTNSVGWAVITDEYKVPSKKFKVLGNTDRHSIKKNLIGALLFDSGETAEATRLKRTARRRYTRRKNRICYLQEIFSNEMAKVDDSFFHRLEESFLVEEDKKHERHPIFGNIVDEVAYHEKYPTIYHLRKKLVDSTDKADLRLIYLALAHMIKFRGHFLIEGDLNPDNSDVDKLFIQLVQTYNQLFEENPINASGVDAKAILSARLSKSRRLENLIAQLPGEKKNGLFGNLIALSLGLTPNFKSNFDLAEDAKLQLSKDTYDDDLDNLLAQIGDQYADLFLAAKNLSDAILLSDILRVNTEITKAPLSASMIKRYDEHHQDLTLLKALVRQQLPEKYKEIFFDQSKNGYAGYIDGGASQEEFYKFIKPILEKMDGTEELLVKLNREDLLRKQRTFDNGSIPHQIHLGELHAILRRQEDFYPFLKDNREKIEKILTFRIPYYVGPLARGNSRFAWMTRKSEETITPWNFEEVVDKGASAQSFIERMTNFDKNLPNEKVLPKHSLLYEYFTVYNELTKVKYVTEGMRKPAFLSGEQKKAIVDLLFKTNRKVTVKQLKEDYFKKIECFDSVEISGVEDRFNASLGTYHDLLKIIKDKDFLDNEENEDILEDIVLTLTLFEDREMIEERLKTYAHLFDDKVMKQLKRRRYTGWGRLSRKLINGIRDKQSGKTILDFLKSDGFANRNFMQLIHDDSLTFKEDIQKAQVSGQGDSLHEHIANLAGSPAIKKGILQTVKVVDELVKVMGRHKPENIVIEMARENQTTQKGQKNSRERMKRIEEGIKELGSQILKEHPVENTQLQNEKLYLYYLQNGRDMYVDQELDINRLSDYDVDHIVPQSFLKDDSIDNKVLTRSDKNRGKSDNVPSEEVVKKMKNYWRQLLNAKLITQRKFDNLTKAERGGLSELDKAGFIKRQLVETRQITKHVAQILDSRMNTKYDENDKLIREVKVITLKSKLVSDFRKDFQFYKVREINNYHHAHDAYLNAVVGTALIKKYPKLESEFVYGDYKVYDVRKMIAKSEQEIGKATAKYFFYSNIMNFFKTEITLANGEIRKRPLIETNGETGEIVWDKGRDFATVRKVLSMPQVNIVKKTEVQTGGFSKESILPKRNSDKLIARKKDWDPKKYGGFDSPTVAYSVLVVAKVEKGKSKKLKSVKELLGITIMERSSFEKNPIDFLEAKGYKEVKKDLIIKLPKYSLFELENGRKRMLASAGELQKGNELALPSKYVNFLYLASHYEKLKGSPGSSGSETPGTSESATPESSGSEVEFSHEYWMRHALTLAKRARDEREVPVGAVLVLNNRVIGEGWNRAIGLHDPTAHAEIMALRQGGLVMQNYRLIDATLYVTFEPCVMCAGAMIHSRIGRVVFGVRNAKTGAAGSLMDVLHYPGMNHRVEITEGILADECAALLCYFFRMPREDNEQKQLFVEQHKHYLDEIIEQISEFSKRVILADANLDKVLSAYNKHRDKPIREQAENIIHLFTLTNLGAPAAFKYFDTTIDRKRYTSTKEVLDATLIHQSITGLYETRIDLSQLGGD

SEQ ID NO: 273 - protein, 1543 aa, synthetic construct
  REGION 1..1543: note = 110.2 Cas9 TadAins 1250 polypeptide sequence
MDKKYSIGLAIGTNSVGWAVITDEYKVPSKKFKVLGNTDRHSIKKNLIGALLFDSGETAEATRLKRTARRRYTRRKNRICYLQEIFSNEMAKVDDSFFHRLEESFLVEEDKKHERHPIFGNIVDEVAYHEKYPTIYHLRKKLVDSTDKADLRLIYLALAHMIKFRGHFLIEGDLNPDNSDVDKLFIQLVQTYNQLFEENPINASGVDAKAILSARLSKSRRLENLIAQLPGEKKNGLFGNLIALSLGLTPNFKSNFDLAEDAKLQLSKDTYDDDLDNLLAQIGDQYADLFLAAKNLSDAILLSDILRVNTEITKAPLSASMIKRYDEHHQDLTLLKALVRQQLPEKYKEIFFDQSKNGYAGYIDGGASQEEFYKFIKPILEKMDGTEELLVKLNREDLLRKQRTFDNGSIPHQIHLGELHAILRRQEDFYPFLKDNREKIEKILTFRIPYYVGPLARGNSRFAWMTRKSEETITPWNFEEVVDKGASAQSFIERMTNFDKNLPNEKVLPKHSLLYEYFTVYNELTKVKYVTEGMRKPAFLSGEQKKAIVDLLFKTNRKVTVKQLKEDYFKKIECFDSVEISGVEDRFNASLGTYHDLLKIIKDKDFLDNEENEDILEDIVLTLTLFEDREMIEERLKTYAHLFDDKVMKQLKRRRYTGWGRLSRKLINGIRDKQSGKTILDFLKSDGFANRNFMQLIHDDSLTFKEDIQKAQVSGQGDSLHEHIANLAGSPAIKKGILQTVKVVDELVKVMGRHKPENIVIEMARENQTTQKGQKNSRERMKRIEEGIKELGSQILKEHPVENTQLQNEKLYLYYLQNGRDMYVDQELDINRLSDYDVDHIVPQSFLKDDSIDNKVLTRSDKNRGKSDNVPSEEVVKKMKNYWRQLLNAKLITQRKFDNLTKAERGGLSELDKAGFIKRQLVETRQITKHVAQILDSRMNTKYDENDKLIREVKVITLKSKLVSDFRKDFQFYKVREINNYHHAHDAYLNAVVGTALIKKYPKLESEFVYGDYKVYDVRKMIAKSEQEIGKATAKYFFYSNIMNFFKTEITLANGEIRKRPLIETNGETGEIVWDKGRDFATVRKVLSMPQVNIVKKTEVQTGGFSKESILPKRNSDKLIARKKDWDPKKYGGFDSPTVAYSVLVVAKVEKGKSKKLKSVKELLGITIMERSSFEKNPIDFLEAKGYKEVKKDLIIKLPKYSLFELENGRKRMLASAGELQKGNELALPSKYVNFLYLASHYEKLKGSPGSSGSSGSETPGTSESATPESSGSEVEFSHEYWMRHALTLAKRARDEREVPVGAVLVLNNRVIGEGWNRAIGLHDPTAHAEIMALRQGGLVMQNYRLIDATLYVTFEPCVMCAGAMIHSRIGRVVFGVRNAKTGAAGSLMDVLHYPGMNHRVEITEGILADECAALLCYFFRMPREDNEQKQLFVEQHKHYLDEIIEQISEFSKRVILADANLDKVLSAYNKHRDKPIREQAENIIHLFTLTNLGAPAAFKYFDTTIDRKRYTSTKEVLDATLIHQSITGLYETRIDLSQLGGD

SEQ ID NO: 274 - protein, 1546 aa, synthetic construct
  REGION 1..1546: note = 110.3 Cas9 TadAins 1250 polypeptide sequence
MDKKYSIGLAIGTNSVGWAVITDEYKVPSKKFKVLGNTDRHSIKKNLIGALLFDSGETAEATRLKRTARRRYTRRKNRICYLQEIFSNEMAKVDDSFFHRLEESFLVEEDKKHERHPIFGNIVDEVAYHEKYPTIYHLRKKLVDSTDKADLRLIYLALAHMIKFRGHFLIEGDLNPDNSDVDKLFIQLVQTYNQLFEENPINASGVDAKAILSARLSKSRRLENLIAQLPGEKKNGLFGNLIALSLGLTPNFKSNFDLAEDAKLQLSKDTYDDDLDNLLAQIGDQYADLFLAAKNLSDAILLSDILRVNTEITKAPLSASMIKRYDEHHQDLTLLKALVRQQLPEKYKEIFFDQSKNGYAGYIDGGASQEEFYKFIKPILEKMDGTEELLVKLNREDLLRKQRTFDNGSIPHQIHLGELHAILRRQEDFYPFLKDNREKIEKILTFRIPYYVGPLARGNSRFAWMTRKSEETITPWNFEEVVDKGASAQSFIERMTNFDKNLPNEKVLPKHSLLYEYFTVYNELTKVKYVTEGMRKPAFLSGEQKKAIVDLLFKTNRKVTVKQLKEDYFKKIECFDSVEISGVEDRFNASLGTYHDLLKIIKDKDFLDNEENEDILEDIVLTLTLFEDREMIEERLKTYAHLFDDKVMKQLKRRRYTGWGRLSRKLINGIRDKQSGKTILDFLKSDGFANRNFMQLIHDDSLTFKEDIQKAQVSGQGDSLHEHIANLAGSPAIKKGILQTVKVVDELVKVMGRHKPENIVIEMARENQTTQKGQKNSRERMKRIEEGIKELGSQILKEHPVENTQLQNEKLYLYYLQNGRDMYVDQELDINRLSDYDVDHIVPQSFLKDDSIDNKVLTRSDKNRGKSDNVPSEEVVKKMKNYWRQLLNAKLITQRKFDNLTKAERGGLSELDKAGFIKRQLVETRQITKHVAQILDSRMNTKYDENDKLIREVKVITLKSKLVSDFRKDFQFYKVREINNYHHAHDAYLNAVVGTALIKKYPKLESEFVYGDYKVYDVRKMIAKSEQEIGKATAKYFFYSNIMNFFKTEITLANGEIRKRPLIETNGETGEIVWDKGRDFATVRKVLSMPQVNIVKKTEVQTGGFSKESILPKRNSDKLIARKKDWDPKKYGGFDSPTVAYSVLVVAKVEKGKSKKLKSVKELLGITIMERSSFEKNPIDFLEAKGYKEVKKDLIIKLPKYSLFELENGRKRMLASAGELQKGNELALPSKYVNFLYLASHYEKLKGSPGSSGSSGSETPGTSESATPESGSSSGSEVEFSHEYWMRHALTLAKRARDEREVPVGAVLVLNNRVIGEGWNRAIGLHDPTAHAEIMALRQGGLVMQNYRLIDATLYVTFEPCVMCAGAMIHSRIGRVVFGVRNAKTGAAGSLMDVLHYPGMNHRVEITEGILADECAALLCYFFRMPREDNEQKQLFVEQHKHYLDEIIEQISEFSKRVILADANLDKVLSAYNKHRDKPIREQAENIIHLFTLTNLGAPAAFKYFDTTIDRKRYTSTKEVLDATLIHQSITGLYETRIDLSQLGGD

SEQ ID NO: 275 - protein, 1546 aa, synthetic construct
  REGION 1..1546: note = 110.4 Cas9 TadAins 1250 polypeptide sequence
MDKKYSIGLAIGTNSVGWAVITDEYKVPSKKFKVLGNTDRHSIKKNLIGALLFDSGETAEATRLKRTARRRYTRRKNRICYLQEIFSNEMAKVDDSFFHRLEESFLVEEDKKHERHPIFGNIVDEVAYHEKYPTIYHLRKKLVDSTDKADLRLIYLALAHMIKFRGHFLIEGDLNPDNSDVDKLFIQLVQTYNQLFEENPINASGVDAKAILSARLSKSRRLENLIAQLPGEKKNGLFGNLIALSLGLTPNFKSNFDLAEDAKLQLSKDTYDDDLDNLLAQIGDQYADLFLAAKNLSDAILLSDILRVNTEITKAPLSASMIKRYDEHHQDLTLLKALVRQQLPEKYKEIFFDQSKNGYAGYIDGGASQEEFYKFIKPILEKMDGTEELLVKLNREDLLRKQRTFDNGSIPHQIHLGELHAILRRQEDFYPFLKDNREKIEKILTFRIPYYVGPLARGNSRFAWMTRKSEETITPWNFEEVVDKGASAQSFIERMTNFDKNLPNEKVLPKHSLLYEYFTVYNELTKVKYVTEGMRKPAFLSGEQKKAIVDLLFKTNRKVTVKQLKEDYFKKIECFDSVEISGVEDRFNASLGTYHDLLKIIKDKDFLDNEENEDILEDIVLTLTLFEDREMIEERLKTYAHLFDDKVMKQLKRRRYTGWGRLSRKLINGIRDKQSGKTILDFLKSDGFANRNFMQLIHDDSLTFKEDIQKAQVSGQGDSLHEHIANLAGSPAIKKGILQTVKVVDELVKVMGRHKPENIVIEMARENQTTQKGQKNSRERMKRIEEGIKELGSQILKEHPVENTQLQNEKLYLYYLQNGRDMYVDQELDINRLSDYDVDHIVPQSFLKDDSIDNKVLTRSDKNRGKSDNVPSEEVVKKMKNYWRQLLNAKLITQRKFDNLTKAERGGLSELDKAGFIKRQLVETRQITKHVAQILDSRMNTKYDENDKLIREVKVITLKSKLVSDFRKDFQFYKVREINNYHHAHDAYLNAVVGTALIKKYPKLESEFVYGDYKVYDVRKMIAKSEQEIGKATAKYFFYSNIMNFFKTEITLANGEIRKRPLIETNGETGEIVWDKGRDFATVRKVLSMPQVNIVKKTEVQTGGFSKESILPKRNSDKLIARKKDWDPKKYGGFDSPTVAYSVLVVAKVEKGKSKKLKSVKELLGITIMERSSFEKNPIDFLEAKGYKEVKKDLIIKLPKYSLFELENGRKRMLASAGELQKGNELALPSKYVNFLYLASHYEKLKGSPGSSGSSGSETPGTSESATPESGSSSGSEVEFSHEYWMRHALTLAKRARDEREVPVGAVLVLNNRVIGEGWNRAIGLHDPTAHAEIMALRQGGLVMQNYRLIDATLYVTFEPCVMCAGAMIHSRIGRVVFGVRNAKTGAAGSLMDVLHYPGMNHRVEITEGILADECAALLCYFFRMRREDNEQKQLFVEQHKHYLDEIIEQISEFSKRVILADANLDKVLSAYNKHRDKPIREQAENIIHLFTLTNLGAPAAFKYFDTTIDRKRYTSTKEVLDATLIHQSITGLYETRIDLSQLGGD

SEQ ID NO: 276 - protein, 1546 aa, synthetic construct
  REGION 1..1546: note = 110.5 Cas9 TadAins 1249 polypeptide sequence
MDKKYSIGLAIGTNSVGWAVITDEYKVPSKKFKVLGNTDRHSIKKNLIGALLFDSGETAEATRLKRTARRRYTRRKNRICYLQEIFSNEMAKVDDSFFHRLEESFLVEEDKKHERHPIFGNIVDEVAYHEKYPTIYHLRKKLVDSTDKADLRLIYLALAHMIKFRGHFLIEGDLNPDNSDVDKLFIQLVQTYNQLFEENPINASGVDAKAILSARLSKSRRLENLIAQLPGEKKNGLFGNLIALSLGLTPNFKSNFDLAEDAKLQLSKDTYDDDLDNLLAQIGDQYADLFLAAKNLSDAILLSDILRVNTEITKAPLSASMIKRYDEHHQDLTLLKALVRQQLPEKYKEIFFDQSKNGYAGYIDGGASQEEFYKFIKPILEKMDGTEELLVKLNREDLLRKQRTFDNGSIPHQIHLGELHAILRRQEDFYPFLKDNREKIEKILTFRIPYYVGPLARGNSRFAWMTRKSEETITPWNFEEVVDKGASAQSFIERMTNFDKNLPNEKVLPKHSLLYEYFTVYNELTKVKYVTEGMRKPAFLSGEQKKAIVDLLFKTNRKVTVKQLKEDYFKKIECFDSVEISGVEDRFNASLGTYHDLLKIIKDKDFLDNEENEDILEDIVLTLTLFEDREMIEERLKTYAHLFDDKVMKQLKRRRYTGWGRLSRKLINGIRDKQSGKTILDFLKSDGFANRNFMQLIHDDSLTFKEDIQKAQVSGQGDSLHEHIANLAGSPAIKKGILQTVKVVDELVKVMGRHKPENIVIEMARENQTTQKGQKNSRERMKRIEEGIKELGSQILKEHPVENTQLQNEKLYLYYLQNGRDMYVDQELDINRLSDYDVDHIVPQSFLKDDSIDNKVLTRSDKNRGKSDNVPSEEVVKKMKNYWRQLLNAKLITQRKFDNLTKAERGGLSELDKAGFIKRQLVETRQITKHVAQILDSRMNTKYDENDKLIREVKVITLKSKLVSDFRKDFQFYKVREINNYHHAHDAYLNAVVGTALIKKYPKLESEFVYGDYKVYDVRKMIAKSEQEIGKATAKYFFYSNIMNFFKTEITLANGEIRKRPLIETNGETGEIVWDKGRDFATVRKVLSMPQVNIVKKTEVQTGGFSKESILPKRNSDKLIARKKDWDPKKYGGFDSPTVAYSVLVVAKVEKGKSKKLKSVKELLGITIMERSSFEKNPIDFLEAKGYKEVKKDLIIKLPKYSLFELENGRKRMLASAGELQKGNELALPSKYVNFLYLASHYEKLKGSGSSGSSGSETPGTSESATPESGSSSGSEVEFSHEYWMRHALTLAKRARDEREVPVGAVLVLNNRVIGEGWNRAIGLHDPTAHAEIMALRQGGLVMQNYRLIDATLYVTFEPCVMCAGAMIHSRIGRVVFGVRNAKTGAAGSLMDVLHYPGMNHRVEITEGILADECAALLCYFFRMRRPEDNEQKQLFVEQHKHYLDEIIEQISEFSKRVILADANLDKVLSAYNKHRDKPIREQAENIIHLFTLTNLGAPAAFKYFDTTIDRKRYTSTKEVLDATLIHQSITGLYETRIDLSQLGGD

SEQ ID NO: 277 - protein, 1551 aa, synthetic construct
  REGION 1..1551: note = 110.5 Cas9 TadAins delta59-66 1250 polypeptide sequence
MDKKYSIGLAIGTNSVGWAVITDEYKVPSKKFKVLGNTDRHSIKKNLIGALLFDSGETAEATRLKRTARRRYTRRKNRICYLQEIFSNEMAKVDDSFFHRLEESFLVEEDKKHERHPIFGNIVDEVAYHEKYPTIYHLRKKLVDSTDKADLRLIYLALAHMIKFRGHFLIEGDLNPDNSDVDKLFIQLVQTYNQLFEENPINASGVDAKAILSARLSKSRRLENLIAQLPGEKKNGLFGNLIALSLGLTPNFKSNFDLAEDAKLQLSKDTYDDDLDNLLAQIGDQYADLFLAAKNLSDAILLSDILRVNTEITKAPLSASMIKRYDEHHQDLTLLKALVRQQLPEKYKEIFFDQSKNGYAGYIDGGASQEEFYKFIKPILEKMDGTEELLVKLNREDLLRKQRTFDNGSIPHQIHLGELHAILRRQEDFYPFLKDNREKIEKILTFRIPYYVGPLARGNSRFAWMTRKSEETITPWNFEEVVDKGASAQSFIERMTNFDKNLPNEKVLPKHSLLYEYFTVYNELTKVKYVTEGMRKPAFLSGEQKKAIVDLLFKTNRKVTVKQLKEDYFKKIECFDSVEISGVEDRFNASLGTYHDLLKIIKDKDFLDNEENEDILEDIVLTLTLFEDREMIEERLKTYAHLFDDKVMKQLKRRRYTGWGRLSRKLINGIRDKQSGKTILDFLKSDGFANRNFMQLIHDDSLTFKEDIQKAQVSGQGDSLHEHIANLAGSPAIKKGILQTVKVVDELVKVMGRHKPENIVIEMARENQTTQKGQKNSRERMKRIEEGIKELGSQILKEHPVENTQLQNEKLYLYYLQNGRDMYVDQELDINRLSDYDVDHIVPQSFLKDDSIDNKVLTRSDKNRGKSDNVPSEEVVKKMKNYWRQLLNAKLITQRKFDNLTKAERGGLSELDKAGFIKRQLVETRQITKHVAQILDSRMNTKYDENDKLIREVKVITLKSKLVSDFRKDFQFYKVREINNYHHAHDAYLNAVVGTALIKKYPKLESEFVYGDYKVYDVRKMIAKSEQEIGKATAKYFFYSNIMNFFKTEITLANGEIRKRPLIETNGETGEIVWDKGRDFATVRKVLSMPQVNIVKKTEVQTGGFSKESILPKRNSDKLIARKKDWDPKKYGGFDSPTVAYSVLVVAKVEKGKSKKLKSVKELLGITIMERSSFEKNPIDFLEAKGYKEVKKDLIIKLPKYSLFELENGRKRMLASAGELQKGNELALPSKYVNFLYLASHYEKLKGSPGSSGSSGSETPGTSESATPESGSSGSEVEFSHEYWMRHALTLAKRARDEREVPVGAVLVLNNRVIGEGWNRAHAEIMALRQGGLVMQNYRLIDATLYVTFEPCVMCAGAMIHSRIGRVVFGVRNAKTGAAGSLMDVLHYPGMNHRVEITEGILADECAALLCYFFRMPRQVFNAQKKAQSSTDEDNEQKQLFVEQHKHYLDEIIEQISEFSKRVILADANLDKVLSAYNKHRDKPIREQAENIIHLFTLTNLGAPAAFKYFDTTIDRKRYTSTKEVLDATLIHQSITGLYETRIDLSQLGGD

SEQ ID NO: 278 - protein, 1546 aa, synthetic construct
  REGION 1..1546: note = 110.6 Cas9 TadAins 1251 polypeptide sequence
MDKKYSIGLAIGTNSVGWAVITDEYKVPSKKFKVLGNTDRHSIKKNLIGALLFDSGETAEATRLKRTARRRYTRRKNRICYLQEIFSNEMAKVDDSFFHRLEESFLVEEDKKHERHPIFGNIVDEVAYHEKYPTIYHLRKKLVDSTDKADLRLIYLALAHMIKFRGHFLIEGDLNPDNSDVDKLFIQLVQTYNQLFEENPINASGVDAKAILSARLSKSRRLENLIAQLPGEKKNGLFGNLIALSLGLTPNFKSNFDLAEDAKLQLSKDTYDDDLDNLLAQIGDQYADLFLAAKNLSDAILLSDILRVNTEITKAPLSASMIKRYDEHHQDLTLLKALVRQQLPEKYKEIFFDQSKNGYAGYIDGGASQEEFYKFIKPILEKMDGTEELLVKLNREDLLRKQRTFDNGSIPHQIHLGELHAILRRQEDFYPFLKDNREKIEKILTFRIPYYVGPLARGNSRFAWMTRKSEETITPWNFEEVVDKGASAQSFIERMTNFDKNLPNEKVLPKHSLLYEYFTVYNELTKVKYVTEGMRKPAFLSGEQKKAIVDLLFKTNRKVTVKQLKEDYFKKIECFDSVEISGVEDRFNASLGTYHDLLKIIKDKDFLDNEENEDILEDIVLTLTLFEDREMIEERLKTYAHLFDDKVMKQLKRRRYTGWGRLSRKLINGIRDKQSGKTILDFLKSDGFANRNFMQLIHDDSLTFKEDIQKAQVSGQGDSLHEHIANLAGSPAIKKGILQTVKVVDELVKVMGRHKPENIVIEMARENQTTQKGQKNSRERMKRIEEGIKELGSQILKEHPVENTQLQNEKLYLYYLQNGRDMYVDQELDINRLSDYDVDHIVPQSFLKDDSIDNKVLTRSDKNRGKSDNVPSEEVVKKMKNYWRQLLNAKLITQRKFDNLTKAERGGLSELDKAGFIKRQLVETRQITKHVAQILDSRMNTKYDENDKLIREVKVITLKSKLVSDFRKDFQFYKVREINNYHHAHDAYLNAVVGTALIKKYPKLESEFVYGDYKVYDVRKMIAKSEQEIGKATAKYFFYSNIMNFFKTEITLANGEIRKRPLIETNGETGEIVWDKGRDFATVRKVLSMPQVNIVKKTEVQTGGFSKESILPKRNSDKLIARKKDWDPKKYGGFDSPTVAYSVLVVAKVEKGKSKKLKSVKELLGITIMERSSFEKNPIDFLEAKGYKEVKKDLIIKLPKYSLFELENGRKRMLASAGELQKGNELALPSKYVNFLYLASHYEKLKGSPEGSSGSSGSETPGTSESATPESGSSSGSEVEFSHEYWMRHALTLAKRARDEREVPVGAVLVLNNRVIGEGWNRAIGLHDPTAHAEIMALRQGGLVMQNYRLIDATLYVTFEPCVMCAGAMIHSRIGRVVFGVRNAKTGAAGSLMDVLHYPGMNHRVEITEGILADECAALLCYFFRMRRDNEQKQLFVEQHKHYLDEIIEQISEFSKRVILADANLDKVLSAYNKHRDKPIREQAENIIHLFTLTNLGAPAAFKYFDTTIDRKRYTSTKEVLDATLIHQSITGLYETRIDLSQLGGD

SEQ ID NO: 279 - protein, 1546 aa, synthetic construct
  REGION 1..1546: note = 110.7 Cas9 TadAins 1252 polypeptide sequence
MDKKYSIGLAIGTNSVGWAVITDEYKVPSKKFKVLGNTDRHSIKKNLIGALLFDSGETAEATRLKRTARRRYTRRKNRICYLQEIFSNEMAKVDDSFFHRLEESFLVEEDKKHERHPIFGNIVDEVAYHEKYPTIYHLRKKLVDSTDKADLRLIYLALAHMIKFRGHFLIEGDLNPDNSDVDKLFIQLVQTYNQLFEENPINASGVDAKAILSARLSKSRRLENLIAQLPGEKKNGLFGNLIALSLGLTPNFKSNFDLAEDAKLQLSKDTYDDDLDNLLAQIGDQYADLFLAAKNLSDAILLSDILRVNTEITKAPLSASMIKRYDEHHQDLTLLKALVRQQLPEKYKEIFFDQSKNGYAGYIDGGASQEEFYKFIKPILEKMDGTEELLVKLNREDLLRKQRTFDNGSIPHQIHLGELHAILRRQEDFYPFLKDNREKIEKILTFRIPYYVGPLARGNSRFAWMTRKSEETITPWNFEEVVDKGASAQSFIERMTNFDKNLPNEKVLPKHSLLYEYFTVYNELTKVKYVTEGMRKPAFLSGEQKKAIVDLLFKTNRKVTVKQLKEDYFKKIECFDSVEISGVEDRFNASLGTYHDLLKIIKDKDFLDNEENEDILEDIVLTLTLFEDREMIEERLKTYAHLFDDKVMKQLKRRRYTGWGRLSRKLINGIRDKQSGKTILDFLKSDGFANRNFMQLIHDDSLTFKEDIQKAQVSGQGDSLHEHIANLAGSPAIKKGILQTVKVVDELVKVMGRHKPENIVIEMARENQTTQKGQKNSRERMKRIEEGIKELGSQILKEHPVENTQLQNEKLYLYYLQNGRDMYVDQELDINRLSDYDVDHIVPQSFLKDDSIDNKVLTRSDKNRGKSDNVPSEEVVKKMKNYWRQLLNAKLITQRKFDNLTKAERGGLSELDKAGFIKRQLVETRQITKHVAQILDSRMNTKYDENDKLIREVKVITLKSKLVSDFRKDFQFYKVREINNYHHAHDAYLNAVVGTALIKKYPKLESEFVYGDYKVYDVRKMIAKSEQEIGKATAKYFFYSNIMNFFKTEITLANGEIRKRPLIETNGETGEIVWDKGRDFATVRKVLSMPQVNIVKKTEVQTGGFSKESILPKRNSDKLIARKKDWDPKKYGGFDSPTVAYSVLVVAKVEKGKSKKLKSVKELLGITIMERSSFEKNPIDFLEAKGYKEVKKDLIIKLPKYSLFELENGRKRMLASAGELQKGNELALPSKYVNFLYLASHYEKLKGSPEDGSSGSSGSETPGTSESATPESGSSSGSEVEFSHEYWMRHALTLAKRARDEREVPVGAVLVLNNRVIGEGWNRAIGLHDPTAHAEIMALRQGGLVMQNYRLIDATLYVTFEPCVMCAGAMIHSRIGRVVFGVRNAKTGAAGSLMDVLHYPGMNHRVEITEGILADECAALLCYFFRMRRNEQKQLFVEQHKHYLDEIIEQISEFSKRVILADANLDKVLSAYNKHRDKPIREQAENIIHLFTLTNLGAPAAFKYFDTTIDRKRYTSTKEVLDATLIHQSITGLYETRIDLSQLGGD

SEQ ID NO: 280 - protein, 1533 aa, synthetic construct
  REGION 1..1533: note = 110.8 Cas9 TadAins delta59-66 C-truncate 1250 polypeptide sequence
MDKKYSIGLAIGTNSVGWAVITDEYKVPSKKFKVLGNTDRHSIKKNLIGALLFDSGETAEATRLKRTARRRYTRRKNRICYLQEIFSNEMAKVDDSFFHRLEESFLVEEDKKHERHPIFGNIVDEVAYHEKYPTIYHLRKKLVDSTDKADLRLIYLALAHMIKFRGHFLIEGDLNPDNSDVDKLFIQLVQTYNQLFEENPINASGVDAKAILSARLSKSRRLENLIAQLPGEKKNGLFGNLIALSLGLTPNFKSNFDLAEDAKLQLSKDTYDDDLDNLLAQIGDQYADLFLAAKNLSDAILLSDILRVNTEITKAPLSASMIKRYDEHHQDLTLLKALVRQQLPEKYKEIFFDQSKNGYAGYIDGGASQEEFYKFIKPILEKMDGTEELLVKLNREDLLRKQRTFDNGSIPHQIHLGELHAILRRQEDFYPFLKDNREKIEKILTFRIPYYVGPLARGNSRFAWMTRKSEETITPWNFEEVVDKGASAQSFIERMTNFDKNLPNEKVLPKHSLLYEYFTVYNELTKVKYVTEGMRKPAFLSGEQKKAIVDLLFKTNRKVTVKQLKEDYFKKIECFDSVEISGVEDRFNASLGTYHDLLKIIKDKDFLDNEENEDILEDIVLTLTLFEDREMIEERLKTYAHLFDDKVMKQLKRRRYTGWGRLSRKLINGIRDKQSGKTILDFLKSDGFANRNFMQLIHDDSLTFKEDIQKAQVSGQGDSLHEHIANLAGSPAIKKGILQTVKVVDELVKVMGRHKPENIVIEMARENQTTQKGQKNSRERMKRIEEGIKELGSQILKEHPVENTQLQNEKLYLYYLQNGRDMYVDQELDINRLSDYDVDHIVPQSFLKDDSIDNKVLTRSDKNRGKSDNVPSEEVVKKMKNYWRQLLNAKLITQRKFDNLTKAERGGLSELDKAGFIKRQLVETRQITKHVAQILDSRMNTKYDENDKLIREVKVITLKSKLVSDFRKDFQFYKVREINNYHHAHDAYLNAVVGTALIKKYPKLESEFVYGDYKVYDVRKMIAKSEQEIGKATAKYFFYSNIMNFFKTEITLANGEIRKRPLIETNGETGEIVWDKGRDFATVRKVLSMPQVNIVKKTEVQTGGFSKESILPKRNSDKLIARKKDWDPKKYGGFDSPTVAYSVLVVAKVEKGKSKKLKSVKELLGITIMERSSFEKNPIDFLEAKGYKEVKKDLIIKLPKYSLFELENGRKRMLASAGELQKGNELALPSKYVNFLYLASHYEKLKGSPGSSGSETPGTSESATPESSGSEVEFSHEYWMRHALTLAKRARDEREVPVGAVLVLNNRVIGEGWNRAHAEIMALRQGGLVMQNYRLIDATLYVTFEPCVMCAGAMIHSRIGRVVFGVRNAKTGAAGSLMDVLHYPGMNHRVEITEGILADECAALLCYFFRMPRQEDNEQKQLFVEQHKHYLDEIIEQISEFSKRVILADANLDKVLSAYNKHRDKPIREQAENIIHLFTLTNLGAPAAFKYFDTTIDRKRYTSTKEVLDATLIHQSITGLYETRIDLSQLGGD

SEQ ID NO: 281 - protein, 1549 aa, synthetic construct
  REGION 1..1549: note = 111.1 Cas9 TadAins 997 polypeptide sequence
MDKKYSIGLAIGTNSVGWAVITDEYKVPSKKFKVLGNTDRHSIKKNLIGALLFDSGETAEATRLKRTARRRYTRRKNRICYLQEIFSNEMAKVDDSFFHRLEESFLVEEDKKHERHPIFGNIVDEVAYHEKYPTIYHLRKKLVDSTDKADLRLIYLALAHMIKFRGHFLIEGDLNPDNSDVDKLFIQLVQTYNQLFEENPINASGVDAKAILSARLSKSRRLENLIAQLPGEKKNGLFGNLIALSLGLTPNFKSNFDLAEDAKLQLSKDTYDDDLDNLLAQIGDQYADLFLAAKNLSDAILLSDILRVNTEITKAPLSASMIKRYDEHHQDLTLLKALVRQQLPEKYKEIFFDQSKNGYAGYIDGGASQEEFYKFIKPILEKMDGTEELLVKLNREDLLRKQRTFDNGSIPHQIHLGELHAILRRQEDFYPFLKDNREKIEKILTFRIPYYVGPLARGNSRFAWMTRKSEETITPWNFEEVVDKGASAQSFIERMTNFDKNLPNEKVLPKHSLLYEYFTVYNELTKVKYVTEGMRKPAFLSGEQKKAIVDLLFKTNRKVTVKQLKEDYFKKIECFDSVEISGVEDRFNASLGTYHDLLKIIKDKDFLDNEENEDILEDIVLTLTLFEDREMIEERLKTYAHLFDDKVMKQLKRRRYTGWGRLSRKLINGIRDKQSGKTILDFLKSDGFANRNFMQLIHDDSLTFKEDIQKAQVSGQGDSLHEHIANLAGSPAIKKGILQTVKVVDELVKVMGRHKPENIVIEMARENQTTQKGQKNSRERMKRIEEGIKELGSQILKEHPVENTQLQNEKLYLYYLQNGRDMYVDQELDINRLSDYDVDHIVPQSFLKDDSIDNKVLTRSDKNRGKSDNVPSEEVVKKMKNYWRQLLNAKLITQRKFDNLTKAERGGLSELDKAGFIKRQLVETRQITKHVAQILDSRMNTKYDENDKLIREVKVITLKSKLVSDFRKDFQFYKVREINNYHHAHDAYLNAVVGTALSHEYWMRHALTLAKRARDEREVPVGAVLVLNNRVIGEGWNRAIGLHDPTAHAEIMALRQGGLVMQNYRLIDATLYVTFEPCVMCAGAMIHSRIGRVVFGVRNAKTGAAGSLMDVLHYPGMNHRVEITEGILADECAALLCYFFRMPRQVFNAQKKAQSSTDGSSGSETPGTSESATPESSGIKKYPKLESEFVYGDYKVYDVRKMIAKSEQEIGKATAKYFFYSNIMNFFKTEITLANGEIRKRPLIETNGETGEIVWDKGRDFATVRKVLSMPQVNIVKKTEVQTGGFSKESILPKRNSDKLIARKKDWDPKKYGGFDSPTVAYSVLVVAKVEKGKSKKLKSVKELLGITIMERSSFEKNPIDFLEAKGYKEVKKDLIIKLPKYSLFELENGRKRMLASAGELQKGNELALPSKYVNFLYLASHYEKLKGSPEDNEQKQLFVEQHKHYLDEIIEQISEFSKRVILADANLDKVLSAYNKHRDKPIREQAENIIHLFTLTNLGAPAAFKYFDTTIDRKRYTSTKEVLDATLIHQSITGLYETRIDLSQLGGD

SEQ ID NO: 282 - protein, 1555 aa, synthetic construct
  REGION 1..1555: note = 111.2 Cas9 TadAins 997 polypeptide sequence
MDKKYSIGLAIGTNSVGWAVITDEYKVPSKKFKVLGNTDRHSIKKNLIGALLFDSGETAEATRLKRTARRRYTRRKNRICYLQEIFSNEMAKVDDSFFHRLEESFLVEEDKKHERHPIFGNIVDEVAYHEKYPTIYHLRKKLVDSTDKADLRLIYLALAHMIKFRGHFLIEGDLNPDNSDVDKLFIQLVQTYNQLFEENPINASGVDAKAILSARLSKSRRLENLIAQLPGEKKNGLFGNLIALSLGLTPNFKSNFDLAEDAKLQLSKDTYDDDLDNLLAQIGDQYADLFLAAKNLSDAILLSDILRVNTEITKAPLSASMIKRYDEHHQDLTLLKALVRQQLPEKYKEIFFDQSKNGYAGYIDGGASQEEFYKFIKPILEKMDGTEELLVKLNREDLLRKQRTFDNGSIPHQIHLGELHAILRRQEDFYPFLKDNREKIEKILTFRIPYYVGPLARGNSRFAWMTRKSEETITPWNFEEVVDKGASAQSFIERMTNFDKNLPNEKVLPKHSLLYEYFTVYNELTKVKYVTEGMRKPAFLSGEQKKAIVDLLFKTNRKVTVKQLKEDYFKKIECFDSVEISGVEDRFNASLGTYHDLLKIIKDKDFLDNEENEDILEDIVLTLTLFEDREMIEERLKTYAHLFDDKVMKQLKRRRYTGWGRLSRKLINGIRDKQSGKTILDFLKSDGFANRNFMQLIHDDSLTFKEDIQKAQVSGQGDSLHEHIANLAGSPAIKKGILQTVKVVDELVKVMGRHKPENIVIEMARENQTTQKGQKNSRERMKRIEEGIKELGSQILKEHPVENTQLQNEKLYLYYLQNGRDMYVDQELDINRLSDYDVDHIVPQSFLKDDSIDNKVLTRSDKNRGKSDNVPSEEVVKKMKNYWRQLLNAKLITQRKFDNLTKAERGGLSELDKAGFIKRQLVETRQITKHVAQILDSRMNTKYDENDKLIREVKVITLKSKLVSDFRKDFQFYKVREINNYHHAHDAYLNAVVGTALSHEYWMRHALTLAKRARDEREVPVGAVLVLNNRVIGEGWNRAIGLHDPTAHAEIMALRQGGLVMQNYRLIDATLYVTFEPCVMCAGAMIHSRIGRVVFGVRNAKTGAAGSLMDVLHYPGMNHRVEITEGILADECAALLCYFFRMPRQVFNAQKKAQSSTDGSSGSSGSETPGTSESATPESSGGSSIKKYPKLESEFVYGDYKVYDVRKMIAKSEQEIGKATAKYFFYSNIMNFFKTEITLANGEIRKRPLIETNGETGEIVWDKGRDFATVRKVLSMPQVNIVKKTEVQTGGFSKESILPKRNSDKLIARKKDWDPKKYGGFDSPTVAYSVLVVAKVEKGKSKKLKSVKELLGITIMERSSFEKNPIDFLEAKGYKEVKKDLIIKLPKYSLFELENGRKRMLASAGELQKGNELALPSKYVNFLYLASHYEKLKGSPEDNEQKQLFVEQHKHYLDEIIEQISEFSKRVILADANLDKVLSAYNKHRDKPIREQAENIIHLFTLTNLGAPAAFKYFDTTIDRKRYTSTKEVLDATLIHQSITGLYETRIDLSQLGGD

SEQ ID NO: 283 - protein, 1421 aa, synthetic construct
  REGION 1..1421: note = 112 delta HNH TadA polypeptide sequence
MDKKYSIGLAIGTNSVGWAVITDEYKVPSKKFKVLGNTDRHSIKKNLIGALLFDSGETAEATRLKRTARRRYTRRKNRICYLQEIFSNEMAKVDDSFFHRLEESFLVEEDKKHERHPIFGNIVDEVAYHEKYPTIYHLRKKLVDSTDKADLRLIYLALAHMIKFRGHFLIEGDLNPDNSDVDKLFIQLVQTYNQLFEENPINASGVDAKAILSARLSKSRRLENLIAQLPGEKKNGLFGNLIALSLGLTPNFKSNFDLAEDAKLQLSKDTYDDDLDNLLAQIGDQYADLFLAAKNLSDAILLSDILRVNTEITKAPLSASMIKRYDEHHQDLTLLKALVRQQLPEKYKEIFFDQSKNGYAGYIDGGASQEEFYKFIKPILEKMDGTEELLVKLNREDLLRKQRTFDNGSIPHQIHLGELHAILRRQEDFYPFLKDNREKIEKILTFRIPYYVGPLARGNSRFAWMTRKSEETITPWNFEEVVDKGASAQSFIERMTNFDKNLPNEKVLPKHSLLYEYFTVYNELTKVKYVTEGMRKPAFLSGEQKKAIVDLLFKTNRKVTVKQLKEDYFKKIECFDSVEISGVEDRFNASLGTYHDLLKIIKDKDFLDNEENEDILEDIVLTLTLFEDREMIEERLKTYAHLFDDKVMKQLKRRRYTGWGRLSRKLINGIRDKQSGKTILDFLKSDGFANRNFMQLIHDDSLTFKEDIQKAQVSGQGDSLHEHIANLAGSPAIKKGILQTVKVVDELVKVMGRHKPENIVIEMARENQTTQKGQKNSRERMKRIEEGIKELGSEVEFSHEYWMRHALTLAKRARDEREVPVGAVLVLNNRVIGEGWNRAIGLHDPTAHAEIMALRQGGLVMQNYRLIDATLYVTFEPCVMCAGAMIHSRIGRVVFGVRNAKTGAAGSLMDVLHYPGMNHRVEITEGILADECAALLCYFFRMPRQVFNAQKKAQSSTDGGLSELDKAGFIKRQLVETRQITKHVAQILDSRMNTKYDENDKLIREVKVITLKSKLVSDFRKDFQFYKVREINNYHHAHDAYLNAVVGTALIKKYPKLESEFVYGDYKVYDVRKMIAKSEQEIGKATAKYFFYSNIMNFFKTEITLANGEIRKRPLIETNGETGEIVWDKGRDFATVRKVLSMPQVNIVKKTEVQTGGFSKESILPKRNSDKLIARKKDWDPKKYGGFDSPTVAYSVLVVAKVEKGKSKKLKSVKELLGITIMERSSFEKNPIDFLEAKGYKEVKKDLIIKLPKYSLFELENGRKRMLASAGELQKGNELALPSKYVNFLYLASHYEKLKGSPEDNEQKQLFVEQHKHYLDEIIEQISEFSKRVILADANLDKVLSAYNKHRDKPIREQAENIIHLFTLTNLGAPAAFKYFDTTIDRKRYTSTKEVLDATLIHQSITGLYETRIDLSQLGGD

SEQ ID NO: 284 - protein, 1552 aa, synthetic construct
  REGION 1..1552: note = 113 N-term single TadA helixtrunc 165-end polypeptide sequence
MSEVEFSHEYWMRHALTLAKRARDEREVPVGAVLVLNNRVIGEGWNRAIGLHDPTAHAEIMALRQGGLVMQNYRLIDATLYVTFEPCVMCAGAMIHSRIGRVVFGVRNAKTGAAGSLMDVLHYPGMNHRVEITEGILADECAALLCYFFRMPRSGGSSGGSSGSETPGTSESATPESSGGSSGGSDKKYSIGLAIGTNSVGWAVITDEYKVPSKKFKVLGNTDRHSIKKNLIGALLFDSGETAEATRLKRTARRRYTRRKNRICYLQEIFSNEMAKVDDSFFHRLEESFLVEEDKKHERHPIFGNIVDEVAYHEKYPTIYHLRKKLVDSTDKADLRLIYLALAHMIKFRGHFLIEGDLNPDNSDVDKLFIQLVQTYNQLFEENPINASGVDAKAILSARLSKSRRLENLIAQLPGEKKNGLFGNLIALSLGLTPNFKSNFDLAEDAKLQLSKDTYDDDLDNLLAQIGDQYADLFLAAKNLSDAILLSDILRVNTEITKAPLSASMIKRYDEHHQDLTLLKALVRQQLPEKYKEIFFDQSKNGYAGYIDGGASQEEFYKFIKPILEKMDGTEELLVKLNREDLLRKQRTFDNGSIPHQIHLGELHAILRRQEDFYPFLKDNREKIEKILTFRIPYYVGPLARGNSRFAWMTRKSEETITPWNFEEVVDKGASAQSFIERMTNFDKNLPNEKVLPKHSLLYEYFTVYNELTKVKYVTEGMRKPAFLSGEQKKAIVDLLFKTNRKVTVKQLKEDYFKKIECFDSVEISGVEDRFNASLGTYHDLLKIIKDKDFLDNEENEDILEDIVLTLTLFEDREMIEERLKTYAHLFDDKVMKQLKRRRYTGWGRLSRKLINGIRDKQSGKTILDFLKSDGFANRNFMQLIHDDSLTFKEDIQKAQVSGQGDSLHEHIANLAGSPAIKKGILQTVKVVDELVKVMGRHKPENIVIEMARENQTTQKGQKNSRERMKRIEEGIKELGSQILKEHPVENTQLQNEKLYLYYLQNGRDMYVDQELDINRLSDYDVDHIVPQSFLKDDSIDNKVLTRSDKNRGKSDNVPSEEVVKKMKNYWRQLLNAKLITQRKFDNLTKAERGGLSELDKAGFIKRQLVETRQITKHVAQILDSRMNTKYDENDKLIREVKVITLKSKLVSDFRKDFQFYKVREINNYHHAHDAYLNAVVGTALIKKYPKLESEFVYGDYKVYDVRKMIAKSEQEIGKATAKYFFYSNIMNFFKTEITLANGEIRKRPLIETNGETGEIVWDKGRDFATVRKVLSMPQVNIVKKTEVQTGGFSKESILPKRNSDKLIARKKDWDPKKYGGFDSPTVAYSVLVVAKVEKGKSKKLKSVKELLGITIMERSSFEKNPIDFLEAKGYKEVKKDLIIKLPKYSLFELENGRKRMLASAGELQKGNELALPSKYVNFLYLASHYEKLKGSPEDNEQKQLFVEQHKHYLDEIIEQISEFSKRVILADANLDKVLSAYNKHRDKPIREQAENIIHLFTLTNLGAPAAFKYFDTTIDRKRYTSTKEVLDATLIHQSITGLYETRIDLSQLGGD

SEQ ID NO: 285 - protein, 1545 aa, synthetic construct
  REGION 1..1545: note = 114 N-term single TadA helixtrunc 165-end delta 59-65 polypeptide sequence
MSEVEFSHEYWMRHALTLAKRARDEREVPVGAVLVLNNRVIGEGWNRTAHAEIMALRQGGLVMQNYRLIDATLYVTFEPCVMCAGAMIHSRIGRVVFGVRNAKTGAAGSLMDVLHYPGMNHRVEITEGILADECAALLCYFFRMPRSGGSSGGSSGSETPGTSESATPESSGGSSGGSDKKYSIGLAIGTNSVGWAVITDEYKVPSKKFKVLGNTDRHSIKKNLIGALLFDSGETAEATRLKRTARRRYTRRKNRICYLQEIFSNEMAKVDDSFFHRLEESFLVEEDKKHERHPIFGNIVDEVAYHEKYPTIYHLRKKLVDSTDKADLRLIYLALAHMIKFRGHFLIEGDLNPDNSDVDKLFIQLVQTYNQLFEENPINASGVDAKAILSARLSKSRRLENLIAQLPGEKKNGLFGNLIALSLGLTPNFKSNFDLAEDAKLQLSKDTYDDDLDNLLAQIGDQYADLFLAAKNLSDAILLSDILRVNTEITKAPLSASMIKRYDEHHQDLTLLKALVRQQLPEKYKEIFFDQSKNGYAGYIDGGASQEEFYKFIKPILEKMDGTEELLVKLNREDLLRKQRTFDNGSIPHQIHLGELHAILRRQEDFYPFLKDNREKIEKILTFRIPYYVGPLARGNSRFAWMTRKSEETITPWNFEEVVDKGASAQSFIERMTNFDKNLPNEKVLPKHSLLYEYFTVYNELTKVKYVTEGMRKPAFLSGEQKKAIVDLLFKTNRKVTVKQLKEDYFKKIECFDSVEISGVEDRFNASLGTYHDLLKIIKDKDFLDNEENEDILEDIVLTLTLFEDREMIEERLKTYAHLFDDKVMKQLKRRRYTGWGRLSRKLINGIRDKQSGKTILDFLKSDGFANRNFMQLIHDDSLTFKEDIQKAQVSGQGDSLHEHIANLAGSPAIKKGILQTVKVVDELVKVMGRHKPENIVIEMARENQTTQKGQKNSRERMKRIEEGIKELGSQILKEHPVENTQLQNEKLYLYYLQNGRDMYVDQELDINRLSDYDVDHIVPQSFLKDDSIDNKVLTRSDKNRGKSDNVPSEEVVKKMKNYWRQLLNAKLITQRKFDNLTKAERGGLSELDKAGFIKRQLVETRQITKHVAQILDSRMNTKYDENDKLIREVKVITLKSKLVSDFRKDFQFYKVREINNYHHAHDAYLNAVVGTALIKKYPKLESEFVYGDYKVYDVRKMIAKSEQEIGKATAKYFFYSNIMNFFKTEITLANGEIRKRPLIETNGETGEIVWDKGRDFATVRKVLSMPQVNIVKKTEVQTGGFSKESILPKRNSDKLIARKKDWDPKKYGGFDSPTVAYSVLVVAKVEKGKSKKLKSVKELLGITIMERSSFEKNPIDFLEAKGYKEVKKDLIIKLPKYSLFELENGRKRMLASAGELQKGNELALPSKYVNFLYLASHYEKLKGSPEDNEQKQLFVEQHKHYLDEIIEQISEFSKRVILADANLDKVLSAYNKHRDKPIREQAENIIHLFTLTNLGAPAAFKYFDTTIDRKRYTSTKEVLDATLIHQSITGLYETRIDLSQLGGD

SEQ ID NO: 286 - protein, 1541 aa, synthetic construct
  REGION 1..1541: note = 115.1 Cas9 TadAins 1004 polypeptide sequence
MDKKYSIGLAIGTNSVGWAVITDEYKVPSKKFKVLGNTDRHSIKKNLIGALLFDSGETAEATRLKRTARRRYTRRKNRICYLQEIFSNEMAKVDDSFFHRLEESFLVEEDKKHERHPIFGNIVDEVAYHEKYPTIYHLRKKLVDSTDKADLRLIYLALAHMIKFRGHFLIEGDLNPDNSDVDKLFIQLVQTYNQLFEENPINASGVDAKAILSARLSKSRRLENLIAQLPGEKKNGLFGNLIALSLGLTPNFKSNFDLAEDAKLQLSKDTYDDDLDNLLAQIGDQYADLFLAAKNLSDAILLSDILRVNTEITKAPLSASMIKRYDEHHQDLTLLKALVRQQLPEKYKEIFFDQSKNGYAGYIDGGASQEEFYKFIKPILEKMDGTEELLVKLNREDLLRKQRTFDNGSIPHQIHLGELHAILRRQEDFYPFLKDNREKIEKILTFRIPYYVGPLARGNSRFAWMTRKSEETITPWNFEEVVDKGASAQSFIERMTNFDKNLPNEKVLPKHSLLYEYFTVYNELTKVKYVTEGMRKPAFLSGEQKKAIVDLLFKTNRKVTVKQLKEDYFKKIECFDSVEISGVEDRFNASLGTYHDLLKIIKDKDFLDNEENEDILEDIVLTLTLFEDREMIEERLKTYAHLFDDKVMKQLKRRRYTGWGRLSRKLINGIRDKQSGKTILDFLKSDGFANRNFMQLIHDDSLTFKEDIQKAQVSGQGDSLHEHIANLAGSPAIKKGILQTVKVVDELVKVMGRHKPENIVIEMARENQTTQKGQKNSRERMKRIEEGIKELGSQILKEHPVENTQLQNEKLYLYYLQNGRDMYVDQELDINRLSDYDVDHIVPQSFLKDDSIDNKVLTRSDKNRGKSDNVPSEEVVKKMKNYWRQLLNAKLITQRKFDNLTKAERGGLSELDKAGFIKRQLVETRQITKHVAQILDSRMNTKYDENDKLIREVKVITLKSKLVSDFRKDFQFYKVREINNYHHAHDAYLNAVVGTALIKKYPKGSSGSETPGTSESATPESSGSEVEFSHEYWMRHALTLAKRARDEREVPVGAVLVLNNRVIGEGWNRAIGLHDPTAHAEIMALRQGGLVMQNYRLIDATLYVTFEPCVMCAGAMIHSRIGRVVFGVRNAKTGAAGSLMDVLHYPGMNHRVEITEGILADECAALLCYFFRMPRQLESEFVYGDYKVYDVRKMIAKSEQEIGKATAKYFFYSNIMNFFKTEITLANGEIRKRPLIETNGETGEIVWDKGRDFATVRKVLSMPQVNIVKKTEVQTGGFSKESILPKRNSDKLIARKKDWDPKKYGGFDSPTVAYSVLVVAKVEKGKSKKLKSVKELLGITIMERSSFEKNPIDFLEAKGYKEVKKDLIIKLPKYSLFELENGRKRMLASAGELQKGNELALPSKYVNFLYLASHYEKLKGSPEDNEQKQLFVEQHKHYLDEIIEQISEFSKRVILADANLDKVLSAYNKHRDKPIREQAENIIHLFTLTNLGAPAAFKYFDTTIDRKRYTSTKEVLDATLIHQSITGLYETRIDLSQLGGD

SEQ ID NO: 287 - protein, 1541 aa, synthetic construct
  REGION 1..1541: note = 115.2 Cas9 TadAins 1005 polypeptide sequence
MDKKYSIGLAIGTNSVGWAVITDEYKVPSKKFKVLGNTDRHSIKKNLIGALLFDSGETAEATRLKRTARRRYTRRKNRICYLQEIFSNEMAKVDDSFFHRLEESFLVEEDKKHERHPIFGNIVDEVAYHEKYPTIYHLRKKLVDSTDKADLRLIYLALAHMIKFRGHFLIEGDLNPDNSDVDKLFIQLVQTYNQLFEENPINASGVDAKAILSARLSKSRRLENLIAQLPGEKKNGLFGNLIALSLGLTPNFKSNFDLAEDAKLQLSKDTYDDDLDNLLAQIGDQYADLFLAAKNLSDAILLSDILRVNTEITKAPLSASMIKRYDEHHQDLTLLKALVRQQLPEKYKEIFFDQSKNGYAGYIDGGASQEEFYKFIKPILEKMDGTEELLVKLNREDLLRKQRTFDNGSIPHQIHLGELHAILRRQEDFYPFLKDNREKIEKILTFRIPYYVGPLARGNSRFAWMTRKSEETITPWNFEEVVDKGASAQSFIERMTNFDKNLPNEKVLPKHSLLYEYFTVYNELTKVKYVTEGMRKPAFLSGEQKKAIVDLLFKTNRKVTVKQLKEDYFKKIECFDSVEISGVEDRFNASLGTYHDLLKIIKDKDFLDNEENEDILEDIVLTLTLFEDREMIEERLKTYAHLFDDKVMKQLKRRRYTGWGRLSRKLINGIRDKQSGKTILDFLKSDGFANRNFMQLIHDDSLTFKEDIQKAQVSGQGDSLHEHIANLAGSPAIKKGILQTVKVVDELVKVMGRHKPENIVIEMARENQTTQKGQKNSRERMKRIEEGIKELGSQILKEHPVENTQLQNEKLYLYYLQNGRDMYVDQELDINRLSDYDVDHIVPQSFLKDDSIDNKVLTRSDKNRGKSDNVPSEEVVKKMKNYWRQLLNAKLITQRKFDNLTKAERGGLSELDKAGFIKRQLVETRQITKHVAQILDSRMNTKYDENDKLIREVKVITLKSKLVSDFRKDFQFYKVREINNYHHAHDAYLNAVVGTALIKKYPKLGSSGSETPGTSESATPESSGSEVEFSHEYWMRHALTLAKRARDEREVPVGAVLVLNNRVIGEGWNRAIGLHDPTAHAEIMALRQGGLVMQNYRLIDATLYVTFEPCVMCAGAMIHSRIGRVVFGVRNAKTGAAGSLMDVLHYPGMNHRVEITEGILADECAALLCYFFRMPRQESEFVYGDYKVYDVRKMIAKSEQEIGKATAKYFFYSNIMNFFKTEITLANGEIRKRPLIETNGETGEIVWDKGRDFATVRKVLSMPQVNIVKKTEVQTGGFSKESILPKRNSDKLIARKKDWDPKKYGGFDSPTVAYSVLVVAKVEKGKSKKLKSVKELLGITIMERSSFEKNPIDFLEAKGYKEVKKDLIIKLPKYSLFELENGRKRMLASAGELQKGNELALPSKYVNFLYLASHYEKLKGSPEDNEQKQLFVEQHKHYLDEIIEQISEFSKRVILADANLDKVLSAYNKHRDKPIREQAENIIHLFTLTNLGAPAAFKYFDTTIDRKRYTSTKEVLDATLIHQSITGLYETRIDLSQLGGD

SEQ ID NO: 288 - protein, 1541 aa, synthetic construct
  REGION 1..1541: note = 115.3 Cas9 TadAins 1006 polypeptide sequence
MDKKYSIGLAIGTNSVGWAVITDEYKVPSKKFKVLGNTDRHSIKKNLIGALLFDSGETAEATRLKRTARRRYTRRKNRICYLQEIFSNEMAKVDDSFFHRLEESFLVEEDKKHERHPIFGNIVDEVAYHEKYPTIYHLRKKLVDSTDKADLRLIYLALAHMIKFRGHFLIEGDLNPDNSDVDKLFIQLVQTYNQLFEENPINASGVDAKAILSARLSKSRRLENLIAQLPGEKKNGLFGNLIALSLGLTPNFKSNFDLAEDAKLQLSKDTYDDDLDNLLAQIGDQYADLFLAAKNLSDAILLSDILRVNTEITKAPLSASMIKRYDEHHQDLTLLKALVRQQLPEKYKEIFFDQSKNGYAGYIDGGASQEEFYKFIKPILEKMDGTEELLVKLNREDLLRKQRTFDNGSIPHQIHLGELHAILRRQEDFYPFLKDNREKIEKILTFRIPYYVGPLARGNSRFAWMTRKSEETITPWNFEEVVDKGASAQSFIERMTNFDKNLPNEKVLPKHSLLYEYFTVYNELTKVKYVTEGMRKPAFLSGEQKKAIVDLLFKTNRKVTVKQLKEDYFKKIECFDSVEISGVEDRFNASLGTYHDLLKIIKDKDFLDNEENEDILEDIVLTLTLFEDREMIEERLKTYAHLFDDKVMKQLKRRRYTGWGRLSRKLINGIRDKQSGKTILDFLKSDGFANRNFMQLIHDDSLTFKEDIQKAQVSGQGDSLHEHIANLAGSPAIKKGILQTVKVVDELVKVMGRHKPENIVIEMARENQTTQKGQKNSRERMKRIEEGIKELGSQILKEHPVENTQLQNEKLYLYYLQNGRDMYVDQELDINRLSDYDVDHIVPQSFLKDDSIDNKVLTRSDKNRGKSDNVPSEEVVKKMKNYWRQLLNAKLITQRKFDNLTKAERGGLSELDKAGFIKRQLVETRQITKHVAQILDSRMNTKYDENDKLIREVKVITLKSKLVSDFRKDFQFYKVREINNYHHAHDAYLNAVVGTALIKKYPKLEGSSGSETPGTSESATPESSGSEVEFSHEYWMRHALTLAKRARDEREVPVGAVLVLNNRVIGEGWNRAIGLHDPTAHAEIMALRQGGLVMQNYRLIDATLYVTFEPCVMCAGAMIHSRIGRVVFGVRNAKTGAAGSLMDVLHYPGMNHRVEITEGILADECAALLCYFFRMPRQSEFVYGDYKVYDVRKMIAKSEQEIGKATAKYFFYSNIMNFFKTEITLANGEIRKRPLIETNGETGEIVWDKGRDFATVRKVLSMPQVNIVKKTEVQTGGFSKESILPKRNSDKLIARKKDWDPKKYGGFDSPTVAYSVLVVAKVEKGKSKKLKSVKELLGITIMERSSFEKNPIDFLEAKGYKEVKKDLIIKLPKYSLFELENGRKRMLASAGELQKGNELALPSKYVNFLYLASHYEKLKGSPEDNEQKQLFVEQHKHYLDEIIEQISEFSKRVILADANLDKVLSAYNKHRDKPIREQAENIIHLFTLTNLGAPAAFKYFDTTIDRKRYTSTKEVLDATLIHQSITGLYETRIDLSQLGGD

SEQ ID NO: 289 - protein, 1541 aa, synthetic construct
  REGION 1..1541: note = 115.4 Cas9 TadAins 1007 polypeptide sequence
MDKKYSIGLAIGTNSVGWAVITDEYKVPSKKFKVLGNTDRHSIKKNLIGALLFDSGETAEATRLKRTARRRYTRRKNRICYLQEIFSNEMAKVDDSFFHRLEESFLVEEDKKHERHPIFGNIVDEVAYHEKYPTIYHLRKKLVDSTDKADLRLIYLALAHMIKFRGHFLIEGDLNPDNSDVDKLFIQLVQTYNQLFEENPINASGVDAKAILSARLSKSRRLENLIAQLPGEKKNGLFGNLIALSLGLTPNFKSNFDLAEDAKLQLSKDTYDDDLDNLLAQIGDQYADLFLAAKNLSDAILLSDILRVNTEITKAPLSASMIKRYDEHHQDLTLLKALVRQQLPEKYKEIFFDQSKNGYAGYIDGGASQEEFYKFIKPILEKMDGTEELLVKLNREDLLRKQRTFDNGSIPHQIHLGELHAILRRQEDFYPFLKDNREKIEKILTFRIPYYVGPLARGNSRFAWMTRKSEETITPWNFEEVVDKGASAQSFIERMTNFDKNLPNEKVLPKHSLLYEYFTVYNELTKVKYVTEGMRKPAFLSGEQKKAIVDLLFKTNRKVTVKQLKEDYFKKIECFDSVEISGVEDRFNASLGTYHDLLKIIKDKDFLDNEENEDILEDIVLTLTLFEDREMIEERLKTYAHLFDDKVMKQLKRRRYTGWGRLSRKLINGIRDKQSGKTILDFLKSDGFANRNFMQLIHDDSLTFKEDIQKAQVSGQGDSLHEHIANLAGSPAIKKGILQTVKVVDELVKVMGRHKPENIVIEMARENQTTQKGQKNSRERMKRIEEGIKELGSQILKEHPVENTQLQNEKLYLYYLQNGRDMYVDQELDINRLSDYDVDHIVPQSFLKDDSIDNKVLTRSDKNRGKSDNVPSEEVVKKMKNYWRQLLNAKLITQRKFDNLTKAERGGLSELDKAGFIKRQLVETRQITKHVAQILDSRMNTKYDENDKLIREVKVITLKSKLVSDFRKDFQFYKVREINNYHHAHDAYLNAVVGTALIKKYPKLESGSSGSETPGTSESATPESSGSEVEFSHEYWMRHALTLAKRARDEREVPVGAVLVLNNRVIGEGWNRAIGLHDPTAHAEIMALRQGGLVMQNYRLIDATLYVTFEPCVMCAGAMIHSRIGRVVFGVRNAKTGAAGSLMDVLHYPGMNHRVEITEGILADECAALLCYFFRMPRQEFVYGDYKVYDVRKMIAKSEQEIGKATAKYFFYSNIMNFFKTEITLANGEIRKRPLIETNGETGEIVWDKGRDFATVRKVLSMPQVNIVKKTEVQTGGFSKESILPKRNSDKLIARKKDWDPKKYGGFDSPTVAYSVLVVAKVEKGKSKKLKSVKELLGITIMERSSFEKNPIDFLEAKGYKEVKKDLIIKLPKYSLFELENGRKRMLASAGELQKGNELALPSKYVNFLYLASHYEKLKGSPEDNEQKQLFVEQHKHYLDEIIEQISEFSKRVILADANLDKVLSAYNKHRDKPIREQAENIIHLFTLTNLGAPAAFKYFDTTIDRKRYTSTKEVLDATLIHQSITGLYETRIDLSQLGGD

SEQ ID NO: 290 - protein, 1541 aa, synthetic construct
  REGION 1..1541: note = 116.1 Cas9 TadAins C-term truncate 792 polypeptide sequence
MDKKYSIGLAIGTNSVGWAVITDEYKVPSKKFKVLGNTDRHSIKKNLIGALLFDSGETAEATRLKRTARRRYTRRKNRICYLQEIFSNEMAKVDDSFFHRLEESFLVEEDKKHERHPIFGNIVDEVAYHEKYPTIYHLRKKLVDSTDKADLRLIYLALAHMIKFRGHFLIEGDLNPDNSDVDKLFIQLVQTYNQLFEENPINASGVDAKAILSARLSKSRRLENLIAQLPGEKKNGLFGNLIALSLGLTPNFKSNFDLAEDAKLQLSKDTYDDDLDNLLAQIGDQYADLFLAAKNLSDAILLSDILRVNTEITKAPLSASMIKRYDEHHQDLTLLKALVRQQLPEKYKEIFFDQSKNGYAGYIDGGASQEEFYKFIKPILEKMDGTEELLVKLNREDLLRKQRTFDNGSIPHQIHLGELHAILRRQEDFYPFLKDNREKIEKILTFRIPYYVGPLARGNSRFAWMTRKSEETITPWNFEEVVDKGASAQSFIERMTNFDKNLPNEKVLPKHSLLYEYFTVYNELTKVKYVTEGMRKPAFLSGEQKKAIVDLLFKTNRKVTVKQLKEDYFKKIECFDSVEISGVEDRFNASLGTYHDLLKIIKDKDFLDNEENEDILEDIVLTLTLFEDREMIEERLKTYAHLFDDKVMKQLKRRRYTGWGRLSRKLINGIRDKQSGKTILDFLKSDGFANRNFMQLIHDDSLTFKEDIQKAQVSGQGDSLHEHIANLAGSPAIKKGILQTVKVVDELVKVMGRHKPENIVIEMARENQTTQKGQKNSRERMKRIEEGIKELGGSSGSETPGTSESATPESSGSEVEFSHEYWMRHALTLAKRARDEREVPVGAVLVLNNRVIGEGWNRAIGLHDPTAHAEIMALRQGGLVMQNYRLIDATLYVTFEPCVMCAGAMIHSRIGRVVFGVRNAKTGAAGSLMDVLHYPGMNHRVEITEGILADECAALLCYFFRMPRQSQILKEHPVENTQLQNEKLYLYYLQNGRDMYVDQELDINRLSDYDVDHIVPQSFLKDDSIDNKVLTRSDKNRGKSDNVPSEEVVKKMKNYWRQLLNAKLITQRKFDNLTKAERGGLSELDKAGFIKRQLVETRQITKHVAQILDSRMNTKYDENDKLIREVKVITLKSKLVSDFRKDFQFYKVREINNYHHAHDAYLNAVVGTALIKKYPKLESEFVYGDYKVYDVRKMIAKSEQEIGKATAKYFFYSNIMNFFKTEITLANGEIRKRPLIETNGETGEIVWDKGRDFATVRKVLSMPQVNIVKKTEVQTGGFSKESILPKRNSDKLIARKKDWDPKKYGGFDSPTVAYSVLVVAKVEKGKSKKLKSVKELLGITIMERSSFEKNPIDFLEAKGYKEVKKDLIIKLPKYSLFELENGRKRMLASAGELQKGNELALPSKYVNFLYLASHYEKLKGSPEDNEQKQLFVEQHKHYLDEIIEQISEFSKRVILADANLDKVLSAYNKHRDKPIREQAENIIHLFTLTNLGAPAAFKYFDTTIDRKRYTSTKEVLDATLIHQSITGLYETRIDLSQLGGD

SEQ ID NO: 291 - protein, 1541 aa, synthetic construct
  REGION 1..1541: note = 116.2 Cas9 TadAins C-term truncate 791 polypeptide sequence
MDKKYSIGLAIGTNSVGWAVITDEYKVPSKKFKVLGNTDRHSIKKNLIGALLFDSGETAEATRLKRTARRRYTRRKNRICYLQEIFSNEMAKVDDSFFHRLEESFLVEEDKKHERHPIFGNIVDEVAYHEKYPTIYHLRKKLVDSTDKADLRLIYLALAHMIKFRGHFLIEGDLNPDNSDVDKLFIQLVQTYNQLFEENPINASGVDAKAILSARLSKSRRLENLIAQLPGEKKNGLFGNLIALSLGLTPNFKSNFDLAEDAKLQLSKDTYDDDLDNLLAQIGDQYADLFLAAKNLSDAILLSDILRVNTEITKAPLSASMIKRYDEHHQDLTLLKALVRQQLPEKYKEIFFDQSKNGYAGYIDGGASQEEFYKFIKPILEKMDGTEELLVKLNREDLLRKQRTFDNGSIPHQIHLGELHAILRRQEDFYPFLKDNREKIEKILTFRIPYYVGPLARGNSRFAWMTRKSEETITPWNFEEVVDKGASAQSFIERMTNFDKNLPNEKVLPKHSLLYEYFTVYNELTKVKYVTEGMRKPAFLSGEQKKAIVDLLFKTNRKVTVKQLKEDYFKKIECFDSVEISGVEDRFNASLGTYHDLLKIIKDKDFLDNEENEDILEDIVLTLTLFEDREMIEERLKTYAHLFDDKVMKQLKRRRYTGWGRLSRKLINGIRDKQSGKTILDFLKSDGFANRNFMQLIHDDSLTFKEDIQKAQVSGQGDSLHEHIANLAGSPAIKKGILQTVKVVDELVKVMGRHKPENIVIEMARENQTTQKGQKNSRERMKRIEEGIKELGSSGSETPGTSESATPESSGSEVEFSHEYWMRHALTLAKRARDEREVPVGAVLVLNNRVIGEGWNRAIGLHDPTAHAEIMALRQGGLVMQNYRLIDATLYVTFEPCVMCAGAMIHSRIGRVVFGVRNAKTGAAGSLMDVLHYPGMNHRVEITEGILADECAALLCYFFRMPRQGSQILKEHPVENTQLQNEKLYLYYLQNGRDMYVDQELDINRLSDYDVDHIVPQSFLKDDSIDNKVLTRSDKNRGKSDNVPSEEVVKKMKNYWRQLLNAKLITQRKFDNLTKAERGGLSELDKAGFIKRQLVETRQITKHVAQILDSRMNTKYDENDKLIREVKVITLKSKLVSDFRKDFQFYKVREINNYHHAHDAYLNAVVGTALIKKYPKLESEFVYGDYKVYDVRKMIAKSEQEIGKATAKYFFYSNIMNFFKTEITLANGEIRKRPLIETNGETGEIVWDKGRDFATVRKVLSMPQVNIVKKTEVQTGGFSKESILPKRNSDKLIARKKDWDPKKYGGFDSPTVAYSVLVVAKVEKGKSKKLKSVKELLGITIMERSSFEKNPIDFLEAKGYKEVKKDLIIKLPKYSLFELENGRKRMLASAGELQKGNELALPSKYVNFLYLASHYEKLKGSPEDNEQKQLFVEQHKHYLDEIIEQISEFSKRVILADANLDKVLSAYNKHRDKPIREQAENIIHLFTLTNLGAPAAFKYFDTTIDRKRYTSTKEVLDATLIHQSITGLYETRIDLSQLGGD

SEQ ID NO: 292 - protein, 1541 aa, synthetic construct
  REGION 1..1541: note = 116.3 Cas9 TadAins C-term truncate 790 polypeptide sequence
MDKKYSIGLAIGTNSVGWAVITDEYKVPSKKFKVLGNTDRHSIKKNLIGALLFDSGETAEATRLKRTARRRYTRRKNRICYLQEIFSNEMAKVDDSFFHRLEESFLVEEDKKHERHPIFGNIVDEVAYHEKYPTIYHLRKKLVDSTDKADLRLIYLALAHMIKFRGHFLIEGDLNPDNSDVDKLFIQLVQTYNQLFEENPINASGVDAKAILSARLSKSRRLENLIAQLPGEKKNGLFGNLIALSLGLTPNFKSNFDLAEDAKLQLSKDTYDDDLDNLLAQIGDQYADLFLAAKNLSDAILLSDILRVNTEITKAPLSASMIKRYDEHHQDLTLLKALVRQQLPEKYKEIFFDQSKNGYAGYIDGGASQEEFYKFIKPILEKMDGTEELLVKLNREDLLRKQRTFDNGSIPHQIHLGELHAILRRQEDFYPFLKDNREKIEKILTFRIPYYVGPLARGNSRFAWMTRKSEETITPWNFEEVVDKGASAQSFIERMTNFDKNLPNEKVLPKHSLLYEYFTVYNELTKVKYVTEGMRKPAFLSGEQKKAIVDLLFKTNRKVTVKQLKEDYFKKIECFDSVEISGVEDRFNASLGTYHDLLKIIKDKDFLDNEENEDILEDIVLTLTLFEDREMIEERLKTYAHLFDDKVMKQLKRRRYTGWGRLSRKLINGIRDKQSGKTILDFLKSDGFANRNFMQLIHDDSLTFKEDIQKAQVSGQGDSLHEHIANLAGSPAIKKGILQTVKVVDELVKVMGRHKPENIVIEMARENQTTQKGQKNSRERMKRIEEGIKEGSSGSETPGTSESATPESSGSEVEFSHEYWMRHALTLAKRARDEREVPVGAVLVLNNRVIGEGWNRAIGLHDPTAHAEIMALRQGGLVMQNYRLIDATLYVTFEPCVMCAGAMIHSRIGRVVFGVRNAKTGAAGSLMDVLHYPGMNHRVEITEGILADECAALLCYFFRMPRQLGSQILKEHPVENTQLQNEKLYLYYLQNGRDMYVDQELDINRLSDYDVDHIVPQSFLKDDSIDNKVLTRSDKNRGKSDNVPSEEVVKKMKNYWRQLLNAKLITQRKFDNLTKAERGGLSELDKAGFIKRQLVETRQITKHVAQILDSRMNTKYDENDKLIREVKVITLKSKLVSDFRKDFQFYKVREINNYHHAHDAYLNAVVGTALIKKYPKLESEFVYGDYKVYDVRKMIAKSEQEIGKATAKYFFYSNIMNFFKTEITLANGEIRKRPLIETNGETGEIVWDKGRDFATVRKVLSMPQVNIVKKTEVQTGGFSKESILPKRNSDKLIARKKDWDPKKYGGFDSPTVAYSVLVVAKVEKGKSKKLKSVKELLGITIMERSSFEKNPIDFLEAKGYKEVKKDLIIKLPKYSLFELENGRKRMLASAGELQKGNELALPSKYVNFLYLASHYEKLKGSPEDNEQKQLFVEQHKHYLDEIIEQISEFSKRVILADANLDKVLSAYNKHRDKPIREQAENIIHLFTLTNLGAPAAFKYFDTTIDRKRYTSTKEVLDATLIHQSITGLYETRIDLSQLGGD

SEQ ID NO: 293 - protein, 1484 aa, synthetic construct
  REGION 1..1484: note = 117 Cas9 delta 1017-1069 polypeptide sequence
MDKKYSIGLAIGTNSVGWAVITDEYKVPSKKFKVLGNTDRHSIKKNLIGALLFDSGETAEATRLKRTARRRYTRRKNRICYLQEIFSNEMAKVDDSFFHRLEESFLVEEDKKHERHPIFGNIVDEVAYHEKYPTIYHLRKKLVDSTDKADLRLIYLALAHMIKFRGHFLIEGDLNPDNSDVDKLFIQLVQTYNQLFEENPINASGVDAKAILSARLSKSRRLENLIAQLPGEKKNGLFGNLIALSLGLTPNFKSNFDLAEDAKLQLSKDTYDDDLDNLLAQIGDQYADLFLAAKNLSDAILLSDILRVNTEITKAPLSASMIKRYDEHHQDLTLLKALVRQQLPEKYKEIFFDQSKNGYAGYIDGGASQEEFYKFIKPILEKMDGTEELLVKLNREDLLRKQRTFDNGSIPHQIHLGELHAILRRQEDFYPFLKDNREKIEKILTFRIPYYVGPLARGNSRFAWMTRKSEETITPWNFEEVVDKGASAQSFIERMTNFDKNLPNEKVLPKHSLLYEYFTVYNELTKVKYVTEGMRKPAFLSGEQKKAIVDLLFKTNRKVTVKQLKEDYFKKIECFDSVEISGVEDRFNASLGTYHDLLKIIKDKDFLDNEENEDILEDIVLTLTLFEDREMIEERLKTYAHLFDDKVMKQLKRRRYTGWGRLSRKLINGIRDKQSGKTILDFLKSDGFANRNFMQLIHDDSLTFKEDIQKAQVSGQGDSLHEHIANLAGSPAIKKGILQTVKVVDELVKVMGRHKPENIVIEMARENQTTQKGQKNSRERMKRIEEGIKELGSQILKEHPVENTQLQNEKLYLYYLQNGRDMYVDQELDINRLSDYDVDHIVPQSFLKDDSIDNKVLTRSDKNRGKSDNVPSEEVVKKMKNYWRQLLNAKLITQRKFDNLTKAERGGLSELDKAGFIKRQLVETRQITKHVAQILDSRMNTKYDENDKLIREVKVITLKSKLVSDFRKDFQFYKVREINNYHHAHDAYLNAVVGTALIKKYPKLESEFVYGDYKVYSSGSEVEFSHEYWMRHALTLAKRARDEREVPVGAVLVLNNRVIGEGWNRAIGLHDPTAHAEIMALRQGGLVMQNYRLIDATLYVTFEPCVMCAGAMIHSRIGRVVFGVRNAKTGAAGSLMDVLHYPGMNHRVEITEGILADECAALLCYFFRMPRQVFNAQKKAQSSTDGEIVWDKGRDFATVRKVLSMPQVNIVKKTEVQTGGFSKESILPKRNSDKLIARKKDWDPKKYGGFDSPTVAYSVLVVAKVEKGKSKKLKSVKELLGITIMERSSFEKNPIDFLEAKGYKEVKKDLIIKLPKYSLFELENGRKRMLASAGELQKGNELALPSKYVNFLYLASHYEKLKGSPEDNEQKQLFVEQHKHYLDEIIEQISEFSKRVILADANLDKVLSAYNKHRDKPIREQAENIIHLFTLTNLGAPAAFKYFDTTIDRKRYTSTKEVLDATLIHQSITGLYETRIDLSQLGGD

SEQ ID NO: 294 - protein, 1554 aa, synthetic construct
  REGION 1..1554: note = 118 Cas9 TadA-CP116ins 1067 polypeptide sequence
MDKKYSIGLAIGTNSVGWAVITDEYKVPSKKFKVLGNTDRHSIKKNLIGALLFDSGETAEATRLKRTARRRYTRRKNRICYLQEIFSNEMAKVDDSFFHRLEESFLVEEDKKHERHPIFGNIVDEVAYHEKYPTIYHLRKKLVDSTDKADLRLIYLALAHMIKFRGHFLIEGDLNPDNSDVDKLFIQLVQTYNQLFEENPINASGVDAKAILSARLSKSRRLENLIAQLPGEKKNGLFGNLIALSLGLTPNFKSNFDLAEDAKLQLSKDTYDDDLDNLLAQIGDQYADLFLAAKNLSDAILLSDILRVNTEITKAPLSASMIKRYDEHHQDLTLLKALVRQQLPEKYKEIFFDQSKNGYAGYIDGGASQEEFYKFIKPILEKMDGTEELLVKLNREDLLRKQRTFDNGSIPHQIHLGELHAILRRQEDFYPFLKDNREKIEKILTFRIPYYVGPLARGNSRFAWMTRKSEETITPWNFEEVVDKGASAQSFIERMTNFDKNLPNEKVLPKHSLLYEYFTVYNELTKVKYVTEGMRKPAFLSGEQKKAIVDLLFKTNRKVTVKQLKEDYFKKIECFDSVEISGVEDRFNASLGTYHDLLKIIKDKDFLDNEENEDILEDIVLTLTLFEDREMIEERLKTYAHLFDDKVMKQLKRRRYTGWGRLSRKLINGIRDKQSGKTILDFLKSDGFANRNFMQLIHDDSLTFKEDIQKAQVSGQGDSLHEHIANLAGSPAIKKGILQTVKVVDELVKVMGRHKPENIVIEMARENQTTQKGQKNSRERMKRIEEGIKELGSQILKEHPVENTQLQNEKLYLYYLQNGRDMYVDQELDINRLSDYDVDHIVPQSFLKDDSIDNKVLTRSDKNRGKSDNVPSEEVVKKMKNYWRQLLNAKLITQRKFDNLTKAERGGLSELDKAGFIKRQLVETRQITKHVAQILDSRMNTKYDENDKLIREVKVITLKSKLVSDFRKDFQFYKVREINNYHHAHDAYLNAVVGTALIKKYPKLESEFVYGDYKVYDVRKMIAKSEQEIGKATAKYFFYSNIMNFFKTEITLANGEIRKRPLIETNMNHRVEITEGILADECAALLCYFFRMPRQVFNAQKKAQSSTDGSSGSETPGTSESATPESSGSEVEFSHEYWMRHALTLAKRARDEREVPVGAVLVLNNRVIGEGWNRAIGLHDPTAHAEIMALRQGGLVMQNYRLIDATLYVTFEPCVMCAGAMIHSRIGRVVFGVRNAKTGAAGSLMDVLHYPGGETGEIVWDKGRDFATVRKVLSMPQVNIVKKTEVQTGGFSKESILPKRNSDKLIARKKDWDPKKYGGFDSPTVAYSVLVVAKVEKGKSKKLKSVKELLGITIMERSSFEKNPIDFLEAKGYKEVKKDLIIKLPKYSLFELENGRKRMLASAGELQKGNELALPSKYVNFLYLASHYEKLKGSPEDNEQKQLFVEQHKHYLDEIIEQISEFSKRVILADANLDKVLSAYNKHRDKPIREQAENIIHLFTLTNLGAPAAFKYFDTTIDRKRYTSTKEVLDATLIHQSITGLYETRIDLSQLGGD

SEQ ID NO: 295 - protein, 1554 aa, synthetic construct
  REGION 1..1554: note = 119 Cas9 TadAins 701 polypeptide sequence
MDKKYSIGLAIGTNSVGWAVITDEYKVPSKKFKVLGNTDRHSIKKNLIGALLFDSGETAEATRLKRTARRRYTRRKNRICYLQEIFSNEMAKVDDSFFHRLEESFLVEEDKKHERHPIFGNIVDEVAYHEKYPTIYHLRKKLVDSTDKADLRLIYLALAHMIKFRGHFLIEGDLNPDNSDVDKLFIQLVQTYNQLFEENPINASGVDAKAILSARLSKSRRLENLIAQLPGEKKNGLFGNLIALSLGLTPNFKSNFDLAEDAKLQLSKDTYDDDLDNLLAQIGDQYADLFLAAKNLSDAILLSDILRVNTEITKAPLSASMIKRYDEHHQDLTLLKALVRQQLPEKYKEIFFDQSKNGYAGYIDGGASQEEFYKFIKPILEKMDGTEELLVKLNREDLLRKQRTFDNGSIPHQIHLGELHAILRRQEDFYPFLKDNREKIEKILTFRIPYYVGPLARGNSRFAWMTRKSEETITPWNFEEVVDKGASAQSFIERMTNFDKNLPNEKVLPKHSLLYEYFTVYNELTKVKYVTEGMRKPAFLSGEQKKAIVDLLFKTNRKVTVKQLKEDYFKKIECFDSVEISGVEDRFNASLGTYHDLLKIIKDKDFLDNEENEDILEDIVLTLTLFEDREMIEERLKTYAHLFDDKVMKQLKRRRYTGWGRLSRKLINGIRDKQSGKTILDFLKSDGFANRNFMQLIHDDSGSSGSETPGTSESATPESSGSEVEFSHEYWMRHALTLAKRARDEREVPVGAVLVLNNRVIGEGWNRAIGLHDPTAHAEIMALRQGGLVMQNYRLIDATLYVTFEPCVMCAGAMIHSRIGRVVFGVRNAKTGAAGSLMDVLHYPGMNHRVEITEGILADECAALLCYFFRMPRQVFNAQKKAQSSTDLTFKEDIQKAQVSGQGDSLHEHIANLAGSPAIKKGILQTVKVVDELVKVMGRHKPENIVIEMARENQTTQKGQKNSRERMKRIEEGIKELGSQILKEHPVENTQLQNEKLYLYYLQNGRDMYVDQELDINRLSDYDVDHIVPQSFLKDDSIDNKVLTRSDKNRGKSDNVPSEEVVKKMKNYWRQLLNAKLITQRKFDNLTKAERGGLSELDKAGFIKRQLVETRQITKHVAQILDSRMNTKYDENDKLIREVKVITLKSKLVSDFRKDFQFYKVREINNYHHAHDAYLNAVVGTALIKKYPKLESEFVYGDYKVYDVRKMIAKSEQEIGKATAKYFFYSNIMNFFKTEITLANGEIRKRPLIETNGETGEIVWDKGRDFATVRKVLSMPQVNIVKKTEVQTGGFSKESILPKRNSDKLIARKKDWDPKKYGGFDSPTVAYSVLVVAKVEKGKSKKLKSVKELLGITIMERSSFEKNPIDFLEAKGYKEVKKDLIIKLPKYSLFELENGRKRMLASAGELQKGNELALPSKYVNFLYLASHYEKLKGSPEDNEQKQLFVEQHKHYLDEIIEQISEFSKRVILADANLDKVLSAYNKHRDKPIREQAENIIHLFTLTNLGAPAAFKYFDTTIDRKRYTSTKEVLDATLIHQSITGLYETRIDLSQLGGD

SEQ ID NO: 296 - protein, 1554 aa, synthetic construct
  REGION 1..1554: note = 120 Cas9 TadACP136ins 1248 polypeptide sequence
MDKKYSIGLAIGTNSVGWAVITDEYKVPSKKFKVLGNTDRHSIKKNLIGALLFDSGETAEATRLKRTARRRYTRRKNRICYLQEIFSNEMAKVDDSFFHRLEESFLVEEDKKHERHPIFGNIVDEVAYHEKYPTIYHLRKKLVDSTDKADLRLIYLALAHMIKFRGHFLIEGDLNPDNSDVDKLFIQLVQTYNQLFEENPINASGVDAKAILSARLSKSRRLENLIAQLPGEKKNGLFGNLIALSLGLTPNFKSNFDLAEDAKLQLSKDTYDDDLDNLLAQIGDQYADLFLAAKNLSDAILLSDILRVNTEITKAPLSASMIKRYDEHHQDLTLLKALVRQQLPEKYKEIFFDQSKNGYAGYIDGGASQEEFYKFIKPILEKMDGTEELLVKLNREDLLRKQRTFDNGSIPHQIHLGELHAILRRQEDFYPFLKDNREKIEKILTFRIPYYVGPLARGNSRFAWMTRKSEETITPWNFEEVVDKGASAQSFIERMTNFDKNLPNEKVLPKHSLLYEYFTVYNELTKVKYVTEGMRKPAFLSGEQKKAIVDLLFKTNRKVTVKQLKEDYFKKIECFDSVEISGVEDRFNASLGTYHDLLKIIKDKDFLDNEENEDILEDIVLTLTLFEDREMIEERLKTYAHLFDDKVMKQLKRRRYTGWGRLSRKLINGIRDKQSGKTILDFLKSDGFANRNFMQLIHDDSLTFKEDIQKAQVSGQGDSLHEHIANLAGSPAIKKGILQTVKVVDELVKVMGRHKPENIVIEMARENQTTQKGQKNSRERMKRIEEGIKELGSQILKEHPVENTQLQNEKLYLYYLQNGRDMYVDQELDINRLSDYDVDHIVPQSFLKDDSIDNKVLTRSDKNRGKSDNVPSEEVVKKMKNYWRQLLNAKLITQRKFDNLTKAERGGLSELDKAGFIKRQLVETRQITKHVAQILDSRMNTKYDENDKLIREVKVITLKSKLVSDFRKDFQFYKVREINNYHHAHDAYLNAVVGTALIKKYPKLESEFVYGDYKVYDVRKMIAKSEQEIGKATAKYFFYSNIMNFFKTEITLANGEIRKRPLIETNGETGEIVWDKGRDFATVRKVLSMPQVNIVKKTEVQTGGFSKESILPKRNSDKLIARKKDWDPKKYGGFDSPTVAYSVLVVAKVEKGKSKKLKSVKELLGITIMERSSFEKNPIDFLEAKGYKEVKKDLIIKLPKYSLFELENGRKRMLASAGELQKGNELALPSKYVNFLYLASHYEKLKGSMNHRVEITEGILADECAALLCYFFRMPRQVFNAQKKAQSSTDGSSGSETPGTSESATPESSGSEVEFSHEYWMRHALTLAKRARDEREVPVGAVLVLNNRVIGEGWNRAIGLHDPTAHAEIMALRQGGLVMQNYRLIDATLYVTFEPCVMCAGAMIHSRIGRVVFGVRNAKTGAAGSLMDVLHYPGPEDNEQKQLFVEQHKHYLDEIIEQISEFSKRVILADANLDKVLSAYNKHRDKPIREQAENIIHLFTLTNLGAPAAFKYFDTTIDRKRYTSTKEVLDATLIHQSITGLYETRIDLSQLGGD

SEQ ID NO: 297 - protein, 1554 aa, synthetic construct
  REGION 1..1554: note = 121 Cas9 TadACP136ins 1052 polypeptide sequence
MDKKYSIGLAIGTNSVGWAVITDEYKVPSKKFKVLGNTDRHSIKKNLIGALLFDSGETAEATRLKRTARRRYTRRKNRICYLQEIFSNEMAKVDDSFFHRLEESFLVEEDKKHERHPIFGNIVDEVAYHEKYPTIYHLRKKLVDSTDKADLRLIYLALAHMIKFRGHFLIEGDLNPDNSDVDKLFIQLVQTYNQLFEENPINASGVDAKAILSARLSKSRRLENLIAQLPGEKKNGLFGNLIALSLGLTPNFKSNFDLAEDAKLQLSKDTYDDDLDNLLAQIGDQYADLFLAAKNLSDAILLSDILRVNTEITKAPLSASMIKRYDEHHQDLTLLKALVRQQLPEKYKEIFFDQSKNGYAGYIDGGASQEEFYKFIKPILEKMDGTEELLVKLNREDLLRKQRTFDNGSIPHQIHLGELHAILRRQEDFYPFLKDNREKIEKILTFRIPYYVGPLARGNSRFAWMTRKSEETITPWNFEEVVDKGASAQSFIERMTNFDKNLPNEKVLPKHSLLYEYFTVYNELTKVKYVTEGMRKPAFLSGEQKKAIVDLLFKTNRKVTVKQLKEDYFKKIECFDSVEISGVEDRFNASLGTYHDLLKIIKDKDFLDNEENEDILEDIVLTLTLFEDREMIEERLKTYAHLFDDKVMKQLKRRRYTGWGRLSRKLINGIRDKQSGKTILDFLKSDGFANRNFMQLIHDDSLTFKEDIQKAQVSGQGDSLHEHIANLAGSPAIKKGILQTVKVVDELVKVMGRHKPENIVIEMARENQTTQKGQKNSRERMKRIEEGIKELGSQILKEHPVENTQLQNEKLYLYYLQNGRDMYVDQELDINRLSDYDVDHIVPQSFLKDDSIDNKVLTRSDKNRGKSDNVPSEEVVKKMKNYWRQLLNAKLITQRKFDNLTKAERGGLSELDKAGFIKRQLVETRQITKHVAQILDSRMNTKYDENDKLIREVKVITLKSKLVSDFRKDFQFYKVREINNYHHAHDAYLNAVVGTALIKKYPKLESEFVYGDYKVYDVRKMIAKSEQEIGKATAKYFFYSNIMNFFKTEITLAMNHRVEITEGILADECAALLCYFFRMPRQVFNAQKKAQSSTDGSSGSETPGTSESATPESSGSEVEFSHEYWMRHALTLAKRARDEREVPVGAVLVLNNRVIGEGWNRAIGLHDPTAHAEIMALRQGGLVMQNYRLIDATLYVTFEPCVMCAGAMIHSRIGRVVFGVRNAKTGAAGSLMDVLHYPGNGEIRKRPLIETNGETGEIVWDKGRDFATVRKVLSMPQVNIVKKTEVQTGGFSKESILPKRNSDKLIARKKDWDPKKYGGFDSPTVAYSVLVVAKVEKGKSKKLKSVKELLGITIMERSSFEKNPIDFLEAKGYKEVKKDLIIKLPKYSLFELENGRKRMLASAGELQKGNELALPSKYVNFLYLASHYEKLKGSPEDNEQKQLFVEQHKHYLDEIIEQISEFSKRVILADANLDKVLSAYNKHRDKPIREQAENIIHLFTLTNLGAPAAFKYFDTTIDRKRYTSTKEVLDATLIHQSITGLYETRIDLSQLGGD

SEQ ID NO: 298 - protein, 1554 aa, synthetic construct
  REGION 1..1554: note = 122 Cas9 TadACP136ins 1041 polypeptide sequence
MDKKYSIGLAIGTNSVGWAVITDEYKVPSKKFKVLGNTDRHSIKKNLIGALLFDSGETAEATRLKRTARRRYTRRKNRICYLQEIFSNEMAKVDDSFFHRLEESFLVEEDKKHERHPIFGNIVDEVAYHEKYPTIYHLRKKLVDSTDKADLRLIYLALAHMIKFRGHFLIEGDLNPDNSDVDKLFIQLVQTYNQLFEENPINASGVDAKAILSARLSKSRRLENLIAQLPGEKKNGLFGNLIALSLGLTPNFKSNFDLAEDAKLQLSKDTYDDDLDNLLAQIGDQYADLFLAAKNLSDAILLSDILRVNTEITKAPLSASMIKRYDEHHQDLTLLKALVRQQLPEKYKEIFFDQSKNGYAGYIDGGASQEEFYKFIKPILEKMDGTEELLVKLNREDLLRKQRTFDNGSIPHQIHLGELHAILRRQEDFYPFLKDNREKIEKILTFRIPYYVGPLARGNSRFAWMTRKSEETITPWNFEEVVDKGASAQSFIERMTNFDKNLPNEKVLPKHSLLYEYFTVYNELTKVKYVTEGMRKPAFLSGEQKKAIVDLLFKTNRKVTVKQLKEDYFKKIECFDSVEISGVEDRFNASLGTYHDLLKIIKDKDFLDNEENEDILEDIVLTLTLFEDREMIEERLKTYAHLFDDKVMKQLKRRRYTGWGRLSRKLINGIRDKQSGKTILDFLKSDGFANRNFMQLIHDDSLTFKEDIQKAQVSGQGDSLHEHIANLAGSPAIKKGILQTVKVVDELVKVMGRHKPENIVIEMARENQTTQKGQKNSRERMKRIEEGIKELGSQILKEHPVENTQLQNEKLYLYYLQNGRDMYVDQELDINRLSDYDVDHIVPQSFLKDDSIDNKVLTRSDKNRGKSDNVPSEEVVKKMKNYWRQLLNAKLITQRKFDNLTKAERGGLSELDKAGFIKRQLVETRQITKHVAQILDSRMNTKYDENDKLIREVKVITLKSKLVSDFRKDFQFYKVREINNYHHAHDAYLNAVVGTALIKKYPKLESEFVYGDYKVYDVRKMIAKSEQEIGKATAKYFFYSMNHRVEITEGILADECAALLCYFFRMPRQVFNAQKKAQSSTDGSSGSETPGTSESATPESSGSEVEFSHEYWMRHALTLAKRARDEREVPVGAVLVLNNRVIGEGWNRAIGLHDPTAHAEIMALRQGGLVMQNYRLIDATLYVTFEPCVMCAGAMIHSRIGRVVFGVRNAKTGAAGSLMDVLHYPGNIMNFFKTEITLANGEIRKRPLIETNGETGEIVWDKGRDFATVRKVLSMPQVNIVKKTEVQTGGFSKESILPKRNSDKLIARKKDWDPKKYGGFDSPTVAYSVLVVAKVEKGKSKKLKSVKELLGITIMERSSFEKNPIDFLEAKGYKEVKKDLIIKLPKYSLFELENGRKRMLASAGELQKGNELALPSKYVNFLYLASHYEKLKGSPEDNEQKQLFVEQHKHYLDEIIEQISEFSKRVILADANLDKVLSAYNKHRDKPIREQAENIIHLFTLTNLGAPAAFKYFDTTIDRKRYTSTKEVLDATLIHQSITGLYETRIDLSQLGGD

SEQ ID NO: 299 - protein, 1554 aa, synthetic construct
  REGION 1..1554: note = 123 Cas9 TadACP139ins 1299 polypeptide sequence
MDKKYSIGLAIGTNSVGWAVITDEYKVPSKKFKVLGNTDRHSIKKNLIGALLFDSGETAEATRLKRTARRRYTRRKNRICYLQEIFSNEMAKVDDSFFHRLEESFLVEEDKKHERHPIFGNIVDEVAYHEKYPTIYHLRKKLVDSTDKADLRLIYLALAHMIKFRGHFLIEGDLNPDNSDVDKLFIQLVQTYNQLFEENPINASGVDAKAILSARLSKSRRLENLIAQLPGEKKNGLFGNLIALSLGLTPNFKSNFDLAEDAKLQLSKDTYDDDLDNLLAQIGDQYADLFLAAKNLSDAILLSDILRVNTEITKAPLSASMIKRYDEHHQDLTLLKALVRQQLPEKYKEIFFDQSKNGYAGYIDGGASQEEFYKFIKPILEKMDGTEELLVKLNREDLLRKQRTFDNGSIPHQIHLGELHAILRRQEDFYPFLKDNREKIEKILTFRIPYYVGPLARGNSRFAWMTRKSEETITPWNFEEVVDKGASAQSFIERMTNFDKNLPNEKVLPKHSLLYEYFTVYNELTKVKYVTEGMRKPAFLSGEQKKAIVDLLFKTNRKVTVKQLKEDYFKKIECFDSVEISGVEDRFNASLGTYHDLLKIIKDKDFLDNEENEDILEDIVLTLTLFEDREMIEERLKTYAHLFDDKVMKQLKRRRYTGWGRLSRKLINGIRDKQSGKTILDFLKSDGFANRNFMQLIHDDSLTFKEDIQKAQVSGQGDSLHEHIANLAGSPAIKKGILQTVKVVDELVKVMGRHKPENIVIEMARENQTTQKGQKNSRERMKRIEEGIKELGSQILKEHPVENTQLQNEKLYLYYLQNGRDMYVDQELDINRLSDYDVDHIVPQSFLKDDSIDNKVLTRSDKNRGKSDNVPSEEVVKKMKNYWRQLLNAKLITQRKFDNLTKAERGGLSELDKAGFIKRQLVETRQITKHVAQILDSRMNTKYDENDKLIREVKVITLKSKLVSDFRKDFQFYKVREINNYHHAHDAYLNAVVGTALIKKYPKLESEFVYGDYKVYDVRKMIAKSEQEIGKATAKYFFYSNIMNFFKTEITLANGEIRKRPLIETNGETGEIVWDKGRDFATVRKVLSMPQVNIVKKTEVQTGGFSKESILPKRNSDKLIARKKDWDPKKYGGFDSPTVAYSVLVVAKVEKGKSKKLKSVKELLGITIMERSSFEKNPIDFLEAKGYKEVKKDLIIKLPKYSLFELENGRKRMLASAGELQKGNELALPSKYVNFLYLASHYEKLKGSPEDNEQKQLFVEQHKHYLDEIIEQISEFSKRVILADANLDKVLSAYNKHRMNHRVEITEGILADECAALLCYFFRMPRQVFNAQKKAQSSTDGSSGSETPGTSESATPESSGSEVEFSHEYWMRHALTLAKRARDEREVPVGAVLVLNNRVIGEGWNRAIGLHDPTAHAEIMALRQGGLVMQNYRLIDATLYVTFEPCVMCAGAMIHSRIGRVVFGVRNAKTGAAGSLMDVLHYPGDKPIREQAENIIHLFTLTNLGAPAAFKYFDTTIDRKRYTSTKEVLDATLIHQSITGLYETRIDLSQLGGD

SEQ ID NO: 300 - protein, 1454 aa, synthetic construct
  REGION 1..1454: note = 124 Cas9 delta 792-872TadAins polypeptide sequence
MDKKYSIGLAIGTNSVGWAVITDEYKVPSKKFKVLGNTDRHSIKKNLIGALLFDSGETAEATRLKRTARRRYTRRKNRICYLQEIFSNEMAKVDDSFFHRLEESFLVEEDKKHERHPIFGNIVDEVAYHEKYPTIYHLRKKLVDSTDKADLRLIYLALAHMIKFRGHFLIEGDLNPDNSDVDKLFIQLVQTYNQLFEENPINASGVDAKAILSARLSKSRRLENLIAQLPGEKKNGLFGNLIALSLGLTPNFKSNFDLAEDAKLQLSKDTYDDDLDNLLAQIGDQYADLFLAAKNLSDAILLSDILRVNTEITKAPLSASMIKRYDEHHQDLTLLKALVRQQLPEKYKEIFFDQSKNGYAGYIDGGASQEEFYKFIKPILEKMDGTEELLVKLNREDLLRKQRTFDNGSIPHQIHLGELHAILRRQEDFYPFLKDNREKIEKILTFRIPYYVGPLARGNSRFAWMTRKSEETITPWNFEEVVDKGASAQSFIERMTNFDKNLPNEKVLPKHSLLYEYFTVYNELTKVKYVTEGMRKPAFLSGEQKKAIVDLLFKTNRKVTVKQLKEDYFKKIECFDSVEISGVEDRFNASLGTYHDLLKIIKDKDFLDNEENEDILEDIVLTLTLFEDREMIEERLKTYAHLFDDKVMKQLKRRRYTGWGRLSRKLINGIRDKQSGKTILDFLKSDGFANRNFMQLIHDDSLTFKEDIQKAQVSGQGDSLHEHIANLAGSPAIKKGILQTVKVVDELVKVMGRHKPENIVIEMARENQTTQKGQKNSRERMKRIEEGIKELGSEVEFSHEYWMRHALTLAKRARDEREVPVGAVLVLNNRVIGEGWNRAIGLHDPTAHAEIMALRQGGLVMQNYRLIDATLYVTFEPCVMCAGAMIHSRIGRVVFGVRNAKTGAAGSLMDVLHYPGMNHRVEITEGILADECAALLCYFFRMPRQVFNAQKKAQSSTDEEVVKKMKNYWRQLLNAKLITQRKFDNLTKAERGGLSELDKAGFIKRQLVETRQITKHVAQILDSRMNTKYDENDKLIREVKVITLKSKLVSDFRKDFQFYKVREINNYHHAHDAYLNAVVGTALIKKYPKLESEFVYGDYKVYDVRKMIAKSEQEIGKATAKYFFYSNIMNFFKTEITLANGEIRKRPLIETNGETGEIVWDKGRDFATVRKVLSMPQVNIVKKTEVQTGGFSKESILPKRNSDKLIARKKDWDPKKYGGFDSPTVAYSVLVVAKVEKGKSKKLKSVKELLGITIMERSSFEKNPIDFLEAKGYKEVKKDLIIKLPKYSLFELENGRKRMLASAGELQKGNELALPSKYVNFLYLASHYEKLKGSPEDNEQKQLFVEQHKHYLDEIIEQISEFSKRVILADANLDKVLSAYNKHRDKPIREQAENIIHLFTLTNLGAPAAFKYFDTTIDRKRYTSTKEVLDATLIHQSITGLYETRIDLSQLGGD

SEQ ID NO: 301 - protein, 1420 aa, synthetic construct
  REGION 1..1420: note = 125 Cas9 delta 792-906TadAins polypeptide sequence
MDKKYSIGLAIGTNSVGWAVITDEYKVPSKKFKVLGNTDRHSIKKNLIGALLFDSGETAEATRLKRTARRRYTRRKNRICYLQEIFSNEMAKVDDSFFHRLEESFLVEEDKKHERHPIFGNIVDEVAYHEKYPTIYHLRKKLVDSTDKADLRLIYLALAHMIKFRGHFLIEGDLNPDNSDVDKLFIQLVQTYNQLFEENPINASGVDAKAILSARLSKSRRLENLIAQLPGEKKNGLFGNLIALSLGLTPNFKSNFDLAEDAKLQLSKDTYDDDLDNLLAQIGDQYADLFLAAKNLSDAILLSDILRVNTEITKAPLSASMIKRYDEHHQDLTLLKALVRQQLPEKYKEIFFDQSKNGYAGYIDGGASQEEFYKFIKPILEKMDGTEELLVKLNREDLLRKQRTFDNGSIPHQIHLGELHAILRRQEDFYPFLKDNREKIEKILTFRIPYYVGPLARGNSRFAWMTRKSEETITPWNFEEVVDKGASAQSFIERMTNFDKNLPNEKVLPKHSLLYEYFTVYNELTKVKYVTEGMRKPAFLSGEQKKAIVDLLFKTNRKVTVKQLKEDYFKKIECFDSVEISGVEDRFNASLGTYHDLLKIIKDKDFLDNEENEDILEDIVLTLTLFEDREMIEERLKTYAHLFDDKVMKQLKRRRYTGWGRLSRKLINGIRDKQSGKTILDFLKSDGFANRNFMQLIHDDSLTFKEDIQKAQVSGQGDSLHEHIANLAGSPAIKKGILQTVKVVDELVKVMGRHKPENIVIEMARENQTTQKGQKNSRERMKRIEEGIKELGSEVEFSHEYWMRHALTLAKRARDEREVPVGAVLVLNNRVIGEGWNRAIGLHDPTAHAEIMALRQGGLVMQNYRLIDATLYVTFEPCVMCAGAMIHSRIGRVVFGVRNAKTGAAGSLMDVLHYPGMNHRVEITEGILADECAALLCYFFRMPRQVFNAQKKAQSSTDGLSELDKAGFIKRQLVETRQITKHVAQILDSRMNTKYDENDKLIREVKVITLKSKLVSDFRKDFQFYKVREINNYHHAHDAYLNAVVGTALIKKYPKLESEFVYGDYKVYDVRKMIAKSEQEIGKATAKYFFYSNIMNFFKTEITLANGEIRKRPLIETNGETGEIVWDKGRDFATVRKVLSMPQVNIVKKTEVQTGGFSKESILPKRNSDKLIARKKDWDPKKYGGFDSPTVAYSVLVVAKVEKGKSKKLKSVKELLGITIMERSSFEKNPIDFLEAKGYKEVKKDLIIKLPKYSLFELENGRKRMLASAGELQKGNELALPSKYVNFLYLASHYEKLKGSPEDNEQKQLFVEQHKHYLDEIIEQISEFSKRVILADANLDKVLSAYNKHRDKPIREQAENIIHLFTLTNLGAPAAFKYFDTTIDRKRYTSTKEVLDATLIHQSITGLYETRIDLSQLGGD

SEQ ID NO: 302 - protein, 1554 aa, synthetic construct
  REGION 1..1554: note = 126 TadA CP65ins 1003 polypeptide sequence
MDKKYSIGLAIGTNSVGWAVITDEYKVPSKKFKVLGNTDRHSIKKNLIGALLFDSGETAEATRLKRTARRRYTRRKNRICYLQEIFSNEMAKVDDSFFHRLEESFLVEEDKKHERHPIFGNIVDEVAYHEKYPTIYHLRKKLVDSTDKADLRLIYLALAHMIKFRGHFLIEGDLNPDNSDVDKLFIQLVQTYNQLFEENPINASGVDAKAILSARLSKSRRLENLIAQLPGEKKNGLFGNLIALSLGLTPNFKSNFDLAEDAKLQLSKDTYDDDLDNLLAQIGDQYADLFLAAKNLSDAILLSDILRVNTEITKAPLSASMIKRYDEHHQDLTLLKALVRQQLPEKYKEIFFDQSKNGYAGYIDGGASQEEFYKFIKPILEKMDGTEELLVKLNREDLLRKQRTFDNGSIPHQIHLGELHAILRRQEDFYPFLKDNREKIEKILTFRIPYYVGPLARGNSRFAWMTRKSEETITPWNFEEVVDKGASAQSFIERMTNFDKNLPNEKVLPKHSLLYEYFTVYNELTKVKYVTEGMRKPAFLSGEQKKAIVDLLFKTNRKVTVKQLKEDYFKKIECFDSVEISGVEDRFNASLGTYHDLLKIIKDKDFLDNEENEDILEDIVLTLTLFEDREMIEERLKTYAHLFDDKVMKQLKRRRYTGWGRLSRKLINGIRDKQSGKTILDFLKSDGFANRNFMQLIHDDSLTFKEDIQKAQVSGQGDSLHEHIANLAGSPAIKKGILQTVKVVDELVKVMGRHKPENIVIEMARENQTTQKGQKNSRERMKRIEEGIKELGSQILKEHPVENTQLQNEKLYLYYLQNGRDMYVDQELDINRLSDYDVDHIVPQSFLKDDSIDNKVLTRSDKNRGKSDNVPSEEVVKKMKNYWRQLLNAKLITQRKFDNLTKAERGGLSELDKAGFIKRQLVETRQITKHVAQILDSRMNTKYDENDKLIREVKVITLKSKLVSDFRKDFQFYKVREINNYHHAHDAYLNAVVGTALIKKYPKTAHAEIMALRQGGLVMQNYRLIDATLYVTFEPCVMCAGAMIHSRIGRVVFGVRNAKTGAAGSLMDVLHYPGMNHRVEITEGILADECAALLCYFFRMPRQVFNAQKKAQSSTDGSSGSETPGTSESATPESSGSEVEFSHEYWMRHALTLAKRARDEREVPVGAVLVLNNRVIGEGWNRAIGLHDPLESEFVYGDYKVYDVRKMIAKSEQEIGKATAKYFFYSNIMNFFKTEITLANGEIRKRPLIETNGETGEIVWDKGRDFATVRKVLSMPQVNIVKKTEVQTGGFSKESILPKRNSDKLIARKKDWDPKKYGGFDSPTVAYSVLVVAKVEKGKSKKLKSVKELLGITIMERSSFEKNPIDFLEAKGYKEVKKDLIIKLPKYSLFELENGRKRMLASAGELQKGNELALPSKYVNFLYLASHYEKLKGSPEDNEQKQLFVEQHKHYLDEIIEQISEFSKRVILADANLDKVLSAYNKHRDKPIREQAENIIHLFTLTNLGAPAAFKYFDTTIDRKRYTSTKEVLDATLIHQSITGLYETRIDLSQLGGD

SEQ ID NO: 303 - protein, 1554 aa, synthetic construct
  REGION 1..1554: note = 127 TadA CP65ins 1016 polypeptide sequence
MDKKYSIGLAIGTNSVGWAVITDEYKVPSKKFKVLGNTDRHSIKKNLIGALLFDSGETAEATRLKRTARRRYTRRKNRICYLQEIFSNEMAKVDDSFFHRLEESFLVEEDKKHERHPIFGNIVDEVAYHEKYPTIYHLRKKLVDSTDKADLRLIYLALAHMIKFRGHFLIEGDLNPDNSDVDKLFIQLVQTYNQLFEENPINASGVDAKAILSARLSKSRRLENLIAQLPGEKKNGLFGNLIALSLGLTPNFKSNFDLAEDAKLQLSKDTYDDDLDNLLAQIGDQYADLFLAAKNLSDAILLSDILRVNTEITKAPLSASMIKRYDEHHQDLTLLKALVRQQLPEKYKEIFFDQSKNGYAGYIDGGASQEEFYKFIKPILEKMDGTEELLVKLNREDLLRKQRTFDNGSIPHQIHLGELHAILRRQEDFYPFLKDNREKIEKILTFRIPYYVGPLARGNSRFAWMTRKSEETITPWNFEEVVDKGASAQSFIERMTNFDKNLPNEKVLPKHSLLYEYFTVYNELTKVKYVTEGMRKPAFLSGEQKKAIVDLLFKTNRKVTVKQLKEDYFKKIECFDSVEISGVEDRFNASLGTYHDLLKIIKDKDFLDNEENEDILEDIVLTLTLFEDREMIEERLKTYAHLFDDKVMKQLKRRRYTGWGRLSRKLINGIRDKQSGKTILDFLKSDGFANRNFMQLIHDDSLTFKEDIQKAQVSGQGDSLHEHIANLAGSPAIKKGILQTVKVVDELVKVMGRHKPENIVIEMARENQTTQKGQKNSRERMKRIEEGIKELGSQILKEHPVENTQLQNEKLYLYYLQNGRDMYVDQELDINRLSDYDVDHIVPQSFLKDDSIDNKVLTRSDKNRGKSDNVPSEEVVKKMKNYWRQLLNAKLITQRKFDNLTKAERGGLSELDKAGFIKRQLVETRQITKHVAQILDSRMNTKYDENDKLIREVKVITLKSKLVSDFRKDFQFYKVREINNYHHAHDAYLNAVVGTALIKKYPKLESEFVYGDYKVTAHAEIMALRQGGLVMQNYRLIDATLYVTFEPCVMCAGAMIHSRIGRVVFGVRNAKTGAAGSLMDVLHYPGMNHRVEITEGILADECAALLCYFFRMPRQVFNAQKKAQSSTDGSSGSETPGTSESATPESSGSEVEFSHEYWMRHALTLAKRARDEREVPVGAVLVLNNRVIGEGWNRAIGLHDPYDVRKMIAKSEQEIGKATAKYFFYSNIMNFFKTEITLANGEIRKRPLIETNGETGEIVWDKGRDFATVRKVLSMPQVNIVKKTEVQTGGFSKESILPKRNSDKLIARKKDWDPKKYGGFDSPTVAYSVLVVAKVEKGKSKKLKSVKELLGITIMERSSFEKNPIDFLEAKGYKEVKKDLIIKLPKYSLFELENGRKRMLASAGELQKGNELALPSKYVNFLYLASHYEKLKGSPEDNEQKQLFVEQHKHYLDEIIEQISEFSKRVILADANLDKVLSAYNKHRDKPIREQAENIIHLFTLTNLGAPAAFKYFDTTIDRKRYTSTKEVLDATLIHQSITGLYETRIDLSQLGGD

SEQ ID NO: 304 - protein, 1554 aa, synthetic construct
  REGION 1..1554: note = 128 TadA CP65ins 1022 polypeptide sequence
MDKKYSIGLAIGTNSVGWAVITDEYKVPSKKFKVLGNTDRHSIKKNLIGALLFDSGETAEATRLKRTARRRYTRRKNRICYLQEIFSNEMAKVDDSFFHRLEESFLVEEDKKHERHPIFGNIVDEVAYHEKYPTIYHLRKKLVDSTDKADLRLIYLALAHMIKFRGHFLIEGDLNPDNSDVDKLFIQLVQTYNQLFEENPINASGVDAKAILSARLSKSRRLENLIAQLPGEKKNGLFGNLIALSLGLTPNFKSNFDLAEDAKLQLSKDTYDDDLDNLLAQIGDQYADLFLAAKNLSDAILLSDILRVNTEITKAPLSASMIKRYDEHHQDLTLLKALVRQQLPEKYKEIFFDQSKNGYAGYIDGGASQEEFYKFIKPILEKMDGTEELLVKLNREDLLRKQRTFDNGSIPHQIHLGELHAILRRQEDFYPFLKDNREKIEKILTFRIPYYVGPLARGNSRFAWMTRKSEETITPWNFEEVVDKGASAQSFIERMTNFDKNLPNEKVLPKHSLLYEYFTVYNELTKVKYVTEGMRKPAFLSGEQKKAIVDLLFKTNRKVTVKQLKEDYFKKIECFDSVEISGVEDRFNASLGTYHDLLKIIKDKDFLDNEENEDILEDIVLTLTLFEDREMIEERLKTYAHLFDDKVMKQLKRRRYTGWGRLSRKLINGIRDKQSGKTILDFLKSDGFANRNFMQLIHDDSLTFKEDIQKAQVSGQGDSLHEHIANLAGSPAIKKGILQTVKVVDELVKVMGRHKPENIVIEMARENQTTQKGQKNSRERMKRIEEGIKELGSQILKEHPVENTQLQNEKLYLYYLQNGRDMYVDQELDINRLSDYDVDHIVPQSFLKDDSIDNKVLTRSDKNRGKSDNVPSEEVVKKMKNYWRQLLNAKLITQRKFDNLTKAERGGLSELDKAGFIKRQLVETRQITKHVAQILDSRMNTKYDENDKLIREVKVITLKSKLVSDFRKDFQFYKVREINNYHHAHDAYLNAVVGTALIKKYPKLESEFVYGDYKVYDVRKMITAHAEIMALRQGGLVMQNYRLIDATLYVTFEPCVMCAGAMIHSRIGRVVFGVRNAKTGAAGSLMDVLHYPGMNHRVEITEGILADECAALLCYFFRMPRQVFNAQKKAQSSTDGSSGSETPGTSESATPESSGSEVEFSHEYWMRHALTLAKRARDEREVPVGAVLVLNNRVIGEGWNRAIGLHDPAKSEQEIGKATAKYFFYSNIMNFFKTEITLANGEIRKRPLIETNGETGEIVWDKGRDFATVRKVLSMPQVNIVKKTEVQTGGFSKESILPKRNSDKLIARKKDWDPKKYGGFDSPTVAYSVLVVAKVEKGKSKKLKSVKELLGITIMERSSFEKNPIDFLEAKGYKEVKKDLIIKLPKYSLFELENGRKRMLASAGELQKGNELALPSKYVNFLYLASHYEKLKGSPEDNEQKQLFVEQHKHYLDEIIEQISEFSKRVILADANLDKVLSAYNKHRDKPIREQAENIIHLFTLTNLGAPAAFKYFDTTIDRKRYTSTKEVLDATLIHQSITGLYETRIDLSQLGGD

SEQ ID NO: 305 - protein, 1554 aa, synthetic construct
  REGION 1..1554: note = 129 TadA CP65ins 1029 polypeptide sequence
MDKKYSIGLAIGTNSVGWAVITDEYKVPSKKFKVLGNTDRHSIKKNLIGALLFDSGETAEATRLKRTARRRYTRRKNRICYLQEIFSNEMAKVDDSFFHRLEESFLVEEDKKHERHPIFGNIVDEVAYHEKYPTIYHLRKKLVDSTDKADLRLIYLALAHMIKFRGHFLIEGDLNPDNSDVDKLFIQLVQTYNQLFEENPINASGVDAKAILSARLSKSRRLENLIAQLPGEKKNGLFGNLIALSLGLTPNFKSNFDLAEDAKLQLSKDTYDDDLDNLLAQIGDQYADLFLAAKNLSDAILLSDILRVNTEITKAPLSASMIKRYDEHHQDLTLLKALVRQQLPEKYKEIFFDQSKNGYAGYIDGGASQEEFYKFIKPILEKMDGTEELLVKLNREDLLRKQRTFDNGSIPHQIHLGELHAILRRQEDFYPFLKDNREKIEKILTFRIPYYVGPLARGNSRFAWMTRKSEETITPWNFEEVVDKGASAQSFIERMTNFDKNLPNEKVLPKHSLLYEYFTVYNELTKVKYVTEGMRKPAFLSGEQKKAIVDLLFKTNRKVTVKQLKEDYFKKIECFDSVEISGVEDRFNASLGTYHDLLKIIKDKDFLDNEENEDILEDIVLTLTLFEDREMIEERLKTYAHLFDDKVMKQLKRRRYTGWGRLSRKLINGIRDKQSGKTILDFLKSDGFANRNFMQLIHDDSLTFKEDIQKAQVSGQGDSLHEHIANLAGSPAIKKGILQTVKVVDELVKVMGRHKPENIVIEMARENQTTQKGQKNSRERMKRIEEGIKELGSQILKEHPVENTQLQNEKLYLYYLQNGRDMYVDQELDINRLSDYDVDHIVPQSFLKDDSIDNKVLTRSDKNRGKSDNVPSEEVVKKMKNYWRQLLNAKLITQRKFDNLTKAERGGLSELDKAGFIKRQLVETRQITKHVAQILDSRMNTKYDENDKLIREVKVITLKSKLVSDFRKDFQFYKVREINNYHHAHDAYLNAVVGTALIKKYPKLESEFVYGDYKVYDVRKMIAKSEQEITAHAEIMALRQGGLVMQNYRLIDATLYVTFEPCVMCAGAMIHSRIGRVVFGVRNAKTGAAGSLMDVLHYPGMNHRVEITEGILADECAALLCYFFRMPRQVFNAQKKAQSSTDGSSGSETPGTSESATPESSGSEVEFSHEYWMRHALTLAKRARDEREVPVGAVLVLNNRVIGEGWNRAIGLHDPGKATAKYFFYSNIMNFFKTEITLANGEIRKRPLIETNGETGEIVWDKGRDFATVRKVLSMPQVNIVKKTEVQTGGFSKESILPKRNSDKLIARKKDWDPKKYGGFDSPTVAYSVLVVAKVEKGKSKKLKSVKELLGITIMERSSFEKNPIDFLEAKGYKEVKKDLIIKLPKYSLFELENGRKRMLASAGELQKGNELALPSKYVNFLYLASHYEKLKGSPEDNEQKQLFVEQHKHYLDEIIEQISEFSKRVILADANLDKVLSAYNKHRDKPIREQAENIIHLFTLTNLGAPAAFKYFDTTIDRKRYTSTKEVLDATLIHQSITGLYETRIDLSQLGGD

SEQ ID NO: 306 - protein, 1554 aa, synthetic construct
  REGION 1..1554: note = 130 TadA CP65ins 1041 polypeptide sequence
MDKKYSIGLAIGTNSVGWAVITDEYKVPSKKFKVLGNTDRHSIKKNLIGALLFDSGETAEATRLKRTARRRYTRRKNRICYLQEIFSNEMAKVDDSFFHRLEESFLVEEDKKHERHPIFGNIVDEVAYHEKYPTIYHLRKKLVDSTDKADLRLIYLALAHMIKFRGHFLIEGDLNPDNSDVDKLFIQLVQTYNQLFEENPINASGVDAKAILSARLSKSRRLENLIAQLPGEKKNGLFGNLIALSLGLTPNFKSNFDLAEDAKLQLSKDTYDDDLDNLLAQIGDQYADLFLAAKNLSDAILLSDILRVNTEITKAPLSASMIKRYDEHHQDLTLLKALVRQQLPEKYKEIFFDQSKNGYAGYIDGGASQEEFYKFIKPILEKMDGTEELLVKLNREDLLRKQRTFDNGSIPHQIHLGELHAILRRQEDFYPFLKDNREKIEKILTFRIPYYVGPLARGNSRFAWMTRKSEETITPWNFEEVVDKGASAQSFIERMTNFDKNLPNEKVLPKHSLLYEYFTVYNELTKVKYVTEGMRKPAFLSGEQKKAIVDLLFKTNRKVTVKQLKEDYFKKIECFDSVEISGVEDRFNASLGTYHDLLKIIKDKDFLDNEENEDILEDIVLTLTLFEDREMIEERLKTYAHLFDDKVMKQLKRRRYTGWGRLSRKLINGIRDKQSGKTILDFLKSDGFANRNFMQLIHDDSLTFKEDIQKAQVSGQGDSLHEHIANLAGSPAIKKGILQTVKVVDELVKVMGRHKPENIVIEMARENQTTQKGQKNSRERMKRIEEGIKELGSQILKEHPVENTQLQNEKLYLYYLQNGRDMYVDQELDINRLSDYDVDHIVPQSFLKDDSIDNKVLTRSDKNRGKSDNVPSEEVVKKMKNYWRQLLNAKLITQRKFDNLTKAERGGLSELDKAGFIKRQLVETRQITKHVAQILDSRMNTKYDENDKLIREVKVITLKSKLVSDFRKDFQFYKVREINNYHHAHDAYLNAVVGTALIKKYPKLESEFVYGDYKVYDVRKMIAKSEQEIGKATAKYFFYSTAHAEIMALRQGGLVMQNYRLIDATLYVTFEPCVMCAGAMIHSRIGRVVFGVRNAKTGAAGSLMDVLHYPGMNHRVEITEGILADECAALLCYFFRMPRQVFNAQKKAQSSTDGSSGSETPGTSESATPESSGSEVEFSHEYWMRHALTLAKRARDEREVPVGAVLVLNNRVIGEGWNRAIGLHDPNIMNFFKTEITLANGEIRKRPLIETNGETGEIVWDKGRDFATVRKVLSMPQVNIVKKTEVQTGGFSKESILPKRNSDKLIARKKDWDPKKYGGFDSPTVAYSVLVVAKVEKGKSKKLKSVKELLGITIMERSSFEKNPIDFLEAKGYKEVKKDLIIKLPKYSLFELENGRKRMLASAGELQKGNELALPSKYVNFLYLASHYEKLKGSPEDNEQKQLFVEQHKHYLDEIIEQISEFSKRVILADANLDKVLSAYNKHRDKPIREQAENIIHLFTLTNLGAPAAFKYFDTTIDRKRYTSTKEVLDATLIHQSITGLYETRIDLSQLGGD

SEQ ID NO: 307 - protein, 1554 aa, synthetic construct
  REGION 1..1554: note = 131 TadA CP65ins 1054 polypeptide sequence
MDKKYSIGLAIGTNSVGWAVITDEYKVPSKKFKVLGNTDRHSIKKNLIGALLFDSGETAEATRLKRTARRRYTRRKNRICYLQEIFSNEMAKVDDSFFHRLEESFLVEEDKKHERHPIFGNIVDEVAYHEKYPTIYHLRKKLVDSTDKADLRLIYLALAHMIKFRGHFLIEGDLNPDNSDVDKLFIQLVQTYNQLFEENPINASGVDAKAILSARLSKSRRLENLIAQLPGEKKNGLFGNLIALSLGLTPNFKSNFDLAEDAKLQLSKDTYDDDLDNLLAQIGDQYADLFLAAKNLSDAILLSDILRVNTEITKAPLSASMIKRYDEHHQDLTLLKALVRQQLPEKYKEIFFDQSKNGYAGYIDGGASQEEFYKFIKPILEKMDGTEELLVKLNREDLLRKQRTFDNGSIPHQIHLGELHAILRRQEDFYPFLKDNREKIEKILTFRIPYYVGPLARGNSRFAWMTRKSEETITPWNFEEVVDKGASAQSFIERMTNFDKNLPNEKVLPKHSLLYEYFTVYNELTKVKYVTEGMRKPAFLSGEQKKAIVDLLFKTNRKVTVKQLKEDYFKKIECFDSVEISGVEDRFNASLGTYHDLLKIIKDKDFLDNEENEDILEDIVLTLTLFEDREMIEERLKTYAHLFDDKVMKQLKRRRYTGWGRLSRKLINGIRDKQSGKTILDFLKSDGFANRNFMQLIHDDSLTFKEDIQKAQVSGQGDSLHEHIANLAGSPAIKKGILQTVKVVDELVKVMGRHKPENIVIEMARENQTTQKGQKNSRERMKRIEEGIKELGSQILKEHPVENTQLQNEKLYLYYLQNGRDMYVDQELDINRLSDYDVDHIVPQSFLKDDSIDNKVLTRSDKNRGKSDNVPSEEVVKKMKNYWRQLLNAKLITQRKFDNLTKAERGGLSELDKAGFIKRQLVETRQITKHVAQILDSRMNTKYDENDKLIREVKVITLKSKLVSDFRKDFQFYKVREINNYHHAHDAYLNAVVGTALIKKYPKLESEFVYGDYKVYDVRKMIAKSEQEIGKATAKYFFYSNIMNFFKTEITLANTAHAEIMALRQGGLVMQNYRLIDATLYVTFEPCVMCAGAMIHSRIGRVVFGVRNAKTGAAGSLMDVLHYPGMNHRVEITEGILADECAALLCYFFRMPRQVFNAQKKAQSSTDGSSGSETPGTSESATPESSGSEVEFSHEYWMRHALTLAKRARDEREVPVGAVLVLNNRVIGEGWNRAIGLHDPGEIRKRPLIETNGETGEIVWDKGRDFATVRKVLSMPQVNIVKKTEVQTGGFSKESILPKRNSDKLIARKKDWDPKKYGGFDSPTVAYSVLVVAKVEKGKSKKLKSVKELLGITIMERSSFEKNPIDFLEAKGYKEVKKDLIIKLPKYSLFELENGRKRMLASAGELQKGNELALPSKYVNFLYLASHYEKLKGSPEDNEQKQLFVEQHKHYLDEIIEQISEFSKRVILADANLDKVLSAYNKHRDKPIREQAENIIHLFTLTNLGAPAAFKYFDTTIDRKRYTSTKEVLDATLIHQSITGLYETRIDLSQLGGD

SEQ ID NO: 308 - protein, 1554 aa, synthetic construct
  REGION 1..1554: note = 132 TadA CP65ins 1246 polypeptide sequence
MDKKYSIGLAIGTNSVGWAVITDEYKVPSKKFKVLGNTDRHSIKKNLIGALLFDSGETAEATRLKRTARRRYTRRKNRICYLQEIFSNEMAKVDDSFFHRLEESFLVEEDKKHERHPIFGNIVDEVAYHEKYPTIYHLRKKLVDSTDKADLRLIYLALAHMIKFRGHFLIEGDLNPDNSDVDKLFIQLVQTYNQLFEENPINASGVDAKAILSARLSKSRRLENLIAQLPGEKKNGLFGNLIALSLGLTPNFKSNFDLAEDAKLQLSKDTYDDDLDNLLAQIGDQYADLFLAAKNLSDAILLSDILRVNTEITKAPLSASMIKRYDEHHQDLTLLKALVRQQLPEKYKEIFFDQSKNGYAGYIDGGASQEEFYKFIKPILEKMDGTEELLVKLNREDLLRKQRTFDNGSIPHQIHLGELHAILRRQEDFYPFLKDNREKIEKILTFRIPYYVGPLARGNSRFAWMTRKSEETITPWNFEEVVDKGASAQSFIERMTNFDKNLPNEKVLPKHSLLYEYFTVYNELTKVKYVTEGMRKPAFLSGEQKKAIVDLLFKTNRKVTVKQLKEDYFKKIECFDSVEISGVEDRFNASLGTYHDLLKIIKDKDFLDNEENEDILEDIVLTLTLFEDREMIEERLKTYAHLFDDKVMKQLKRRRYTGWGRLSRKLINGIRDKQSGKTILDFLKSDGFANRNFMQLIHDDSLTFKEDIQKAQVSGQGDSLHEHIANLAGSPAIKKGILQTVKVVDELVKVMGRHKPENIVIEMARENQTTQKGQKNSRERMKRIEEGIKELGSQILKEHPVENTQLQNEKLYLYYLQNGRDMYVDQELDINRLSDYDVDHIVPQSFLKDDSIDNKVLTRSDKNRGKSDNVPSEEVVKKMKNYWRQLLNAKLITQRKFDNLTKAERGGLSELDKAGFIKRQLVETRQITKHVAQILDSRMNTKYDENDKLIREVKVITLKSKLVSDFRKDFQFYKVREINNYHHAHDAYLNAVVGTALIKKYPKLESEFVYGDYKVYDVRKMIAKSEQEIGKATAKYFFYSNIMNFFKTEITLANGEIRKRPLIETNGETGEIVWDKGRDFATVRKVLSMPQVNIVKKTEVQTGGFSKESILPKRNSDKLIARKKDWDPKKYGGFDSPTVAYSVLVVAKVEKGKSKKLKSVKELLGITIMERSSFEKNPIDFLEAKGYKEVKKDLIIKLPKYSLFELENGRKRMLASAGELQKGNELALPSKYVNFLYLASHYEKLKGTAHAEIMALRQGGLVMQNYRLIDATLYVTFEPCVMCAGAMIHSRIGRVVFGVRNAKTGAAGSLMDVLHYPGMNHRVEITEGILADECAALLCYFFRMPRQVFNAQKKAQSSTDGSSGSETPGTSESATPESSGSEVEFSHEYWMRHALTLAKRARDEREVPVGAVLVLNNRVIGEGWNRAIGLHDPSPEDNEQKQLFVEQHKHYLDEIIEQISEFSKRVILADANLDKVLSAYNKHRDKPIREQAENIIHLFTLTNLGAPAAFKYFDTTIDRKRYTSTKEVLDATLIHQSITGLYETRIDLSQLGGD

SEQ ID NO: 309 - protein, 160 aa, Staphylococcus aureus
  REGION 1..160: note = MISC_FEATURE - TadA polypeptide sequence
MGSHMTNDIYFMTLAIEEAKKAAQLGEVPIGAIITKDDEVIARAHNLRETLQQPTAHAEHIAIERAAKVLGSWRLEGCTLYVTLEPCVMCAGTIVMSRIPRVVYGADDPKGGCSGSLMNLLQQSNFNHRAIVDKGVLKEACSTLLTTFFKNLRANKKSTN

SEQ ID NO: 310 - protein, 161 aa, Bacillus subtilis
  REGION 1..161: note = MISC_FEATURE - TadA polypeptide sequence
MTQDELYMKEAIKEAKKAEEKGEVPIGAVLVINGEIIARAHNLRETEQRSIAHAEMLVIDEACKALGTWRLEGATLYVTLEPCPMCAGAVVLSRVEKVVFGAFDPKGGCSGTLMNLLQEERFNHQAEVVSGVLEEECGGMLSAFFRELRKKKKAARKNLSE

SEQ ID NO: 311 - protein, 183 aa, Salmonella enterica
  REGION 1..183: note = MISC_FEATURE - TadA polypeptide sequence
  source 1..183: note = serotype Typhimurium
MPPAFITGVTSLSDVELDHEYWMRHALTLAKRAWDEREVPVGAVLVHNHRVIGEGWNRPIGRHDPTAHAEIMALRQGGLVLQNYRLLDTTLYVTLEPCVMCAGAMVHSRIGRVVFGARDAKTGAAGSLIDVLHHPGMNHRVEIIEGVLRDECATLLSDFFRMRRQEIKALKKADRAEGAGPAV

SEQ ID NO: 312 - protein, 164 aa, Shewanella putrefaciens
  REGION 1..164: note = MISC_FEATURE - TadA polypeptide sequence
MDEYWMQVAMQMAEKAEAAGEVPVGAVLVKDGQQIATGYNLSISQHDPTAHAEILCLRSAGKKLENYRLLDATLYITLEPCAMCAGAMVHSRIARVVYGARDEKTGAAGTVVNLLQHPAFNHQVEVTSGVLAEACSAQLSRFFKRRRDEKKALKLAQRAQQGIE

SEQ ID NO: 313 - protein, 173 aa, Haemophilus influenzae
  REGION 1..173: note = MISC_FEATURE - TadA polypeptide sequence
MDAAKVRSEFDEKMMRYALELADKAEALGEIPVGAVLVDDARNIIGEGWNLSIVQSDPTAHAEIIALRNGAKNIQNYRLLNSTLYVTLEPCTMCAGAILHSRIKRLVFGASDYKTGAIGSRFHFFDDYKMNHTLEITSGVLAEECSQKLSTFFQKRREEKKIEKALLKSLSDK

SEQ ID NO: 314 - protein, 161 aa, Caulobacter crescentus
  REGION 1..161: note = MISC_FEATURE - TadA polypeptide sequence
MRTDESEDQDHRMMRLALDAARAAAEAGETPVGAVILDPSTGEVIATAGNGPIAAHDPTAHAEIAAMRAAAAKLGNYRLTDLTLVVTLEPCAMCAGAISHARIGRVVFGADDPKGGAVVHGPKFFAQPTCHWRPEVTGGVLADESADLLRGFFRARRKAKI

SEQ ID NO: 315 - protein, 179 aa, Geobacter sulfurreducens
  REGION 1..179: note = MISC_FEATURE - TadA polypeptide sequence
MSSLKKTPIRDDAYWMGKAIREAAKAAARDEVPIGAVIVRDGAVIGRGHNLREGSNDPSAHAEMIAIRQAARRSANWRLTGATLYVTLEPCLMCMGAIILARLERVVFGCYDPKGGAAGSLYDLSADPRLNHQVRLSPGVCQEECGTMLSDFFRDLRRRKKAKATPALFIDERKVPPEP

SEQ ID NO: 316 - protein, 167 aa, synthetic construct
  REGION 1..167: note = TadA*8 polypeptide sequence
MSEVEFSHEYWMRHALTLAKRARDEREVPVGAVLVLNNRVIGEGWNRAIGLHDPTAHAEIMALRQGGLVMQNYRLIDATLYVTFEPCVMCAGAMIHSRIGRVVFGVRNAKTGAAGSLMDVLHYPGMNHRVEITEGILADECAALLCTFFRMPRQVFNAQKKAQSSTD

SEQ ID NO: 317 - RNA, 80 nt, synthetic construct
  misc_feature 1..80: note = gRNA scaffold polynucleotide sequence
  source 1..80: mol_type = other RNA
gttttagagctagaaatagcaagttaaaataaggctagtccgttatcaacttgaaaaagtggcaccgagtcggtgctttt

SEQ ID NO: 318 - RNA, 125 nt, synthetic construct
  misc_feature 1..125: note = gRNA scaffold polynucleotide sequence
  source 1..125: mol_type = other RNA
gtttttgtactctcaagatttaagtaactgtacaacgaaacttacacagttacttaaatcttgcagaagctacaaagataaggcttcatgccgaaatcaacaccctgtcattttatggcagggtg

SEQ ID NO: 319 - RNA, 76 nt, Streptococcus pyogenes
  misc_feature 1..76: note = S. pyogenes gRNA scaffold oligonucleotide sequence
  source 1..76: mol_type = other RNA
gttttagagctagaaatagcaagttaaaataaggctagtccgttatcaacttgaaaaagtggcaccgagtcggtgc

SEQ ID NO: 320 - RNA, 84 nt, Staphylococcus aureus
  misc_feature 1..84: note = S. aureus gRNA scaffold oligonucleotide sequence
  source 1..84: mol_type = other RNA
gttttagtactctgtaatgaaaattacagaatctactaaaacaaggcaaaatgccgtgtttatctcgtcaacttgttggcgaga

SEQ ID NO: 321 - RNA, 97 nt, Bacillus hisashii
  misc_feature 1..97: note = BhCas12b gRNA scaffold oligonucleotide sequence
  source 1..97: mol_type = other RNA
gttctgtcttttggtcaggacaaccgtctagctataagtgctgcagggtgtgagaaactcctattgctggacgatgtctcttacgaggcattagcac

SEQ ID NO: 322 - RNA, 88 nt, Bacillus sp.
  misc_feature 1..88: note = BvCas12b gRNA scaffold oligonucleotide sequence
  source 1..88: mol_type = other RNA
gacctatagggtcaatgaatctgtgcgtgtgccataagtaattaaaaattacccaccacaggagcacctgaaaacaggtgcttggcac

SEQ ID NO: 323 - RNA, 80 nt, synthetic construct
  misc_feature 1..80: note = gRNA scaffold nucleotide sequence; oligonucleotide sequence
  modified_base 78..80: mod_base = um
  misc_feature 78..80: note = In embodiments, a nucleotide(s) is linked to the preceding 5' nucleotide by a 3' phosphorothioate internucleotide linkage
  source 1..80: mol_type = other RNA
gttttagagctagaaatagcaagttaaaataaggctagtccgttatcaacttgaaaaagtgggaccgagtcggtgctttt

SEQ ID NO: 324 - RNA, 80 nt, synthetic construct; identical to SEQ ID NO: 317
  misc_feature 1..80: note = gRNA scaffold nucleotide sequence
  misc_feature 78..80: note = In embodiments, a nucleotide(s) is linked to the preceding 5' nucleotide by a 3' phosphorothioate internucleotide linkage
  modified_base 78..80: mod_base = um
  source 1..80: mol_type = other RNA

SEQ ID NO: 325 - RNA, 117 nt, Bacillus hisashii
  misc_feature 1..117: note = BhCas12b gRNA scaffold + guide sequence; oligonucleotide sequence
  misc_feature 1..97: note = BhCas12b sgRNA scaffold
  source 1..117: mol_type = other RNA
gttctgtcttttggtcaggacaaccgtctagctataagtgctgcagggtgtgagaaactcctattgctggacgatgtctcttacgaggcattagcacnnnnnnnnnnnnnnnnnnnn

SEQ ID NO: 326 - RNA, 108 nt, Bacillus sp.
  misc_feature 1..108: note = BvCas12b gRNA scaffold + guide sequence; oligonucleotide sequence
  misc_feature 1..88: note = BvCas12b gRNA scaffold
  source 1..108: mol_type = other RNA
gacctatagggtcaatgaatctgtgcgtgtgccataagtaattaaaaattacccaccacaggagcacctgaaaacaggtgcttggcacnnnnnnnnnnnnnnnnnnnn

SEQ ID NO: 327 - RNA, 119 nt, Alicyclobacillus acidiphilus
  misc_feature 1..119: note = AaCas12b gRNA scaffold + guide sequence; oligonucleotide sequence
  misc_feature 1..99: note = AaCas12b gRNA scaffold
  source 1..119: mol_type = other RNA
gtctaaaggacagaatttttcaacgggtgtgccaatggccactttccaggtggcaaagcccgttgaacttctcaaaaagaacgatctgagaagtggcacnnnnnnnnnnnnnnnnnnnn

SEQ ID NO: 328 - protein, 29 aa, synthetic construct
  REGION 1..29: note = synthetic polypeptide sequence
PKKKRKVEGADKRTADGSEFESPKKKRKV

SEQ ID NO: 329 - protein, 23 aa, synthetic construct
  REGION 1..23: note = synthetic peptide sequence
RKSGKIAAIVVKRPRKPKKKRKV

SEQ ID NO: 330 - protein, 8 aa, synthetic construct
  REGION 1..8: note = synthetic peptide sequence
SGGSSGGS

SEQ ID NO: 331 - protein, 1609 aa, synthetic construct
  REGION 1..1609: note = pNMG-B335ABE8.1_Y147T_CP5_NGC PAM_monomer polypeptide sequence
MSEVEFSHEYWMRHALTLAKRARDEREVPVGAVLVLNNRVIGEGWNRAIGLHDPTAHAEIMALRQGGLVMQNYRLIDATLYVTFEPCVMCAGAMIHSRIGRVVFGVRNAKTGAAGSLMDVLHYPGMNHRVEITEGILADECAALLCTFFRMPRQVFNAQKKAQSSTDSGGSSGGSSGSETPGTSESATPESSGGSSGGSEIGKATAKYFFYSNIMNFFKTEITLANGEIRKRPLIETNGETGEIVWDKGRDFATVRKVLSMPQVNIVKKTEVQTGGFSKESILPKRNSDKLIARKKDWDPKKYGGFMQPTVAYSVLVVAKVEKGKSKKLKSVKELLGITIMERSSFEKNPIDFLEAKGYKEVKKDLIIKLPKYSLFELENGRKRMLASAKFLQKGNELALPSKYVNFLYLASHYEKLKGSPEDNEQKQLFVEQHKHYLDEIIEQISEFSKRVILADANLDKVLSAYNKHRDKPIREQAENIIHLFTLTNLGAPRAFKYFDTTIARKEYRSTKEVLDATLIHQSITGLYETRIDLSQLGGDGGSGGSGGSGGSGGSGGSGGMDKKYSIGLAIGTNSVGWAVITDEYKVPSKKFKVLGNTDRHSIKKNLIGALLFDSGETAEATRLKRTARRRYTRRKNRICYLQEIFSNEMAKVDDSFFHRLEESFLVEEDKKHERHPIFGNIVDEVAYHEKYPTIYHLRKKLVDSTDKADLRLIYLALAHMIKFRGHFLIEGDLNPDNSDVDKLFIQLVQTYNQLFEENPINASGVDAKAILSARLSKSRRLENLIAQLPGEKKNGLFGNLIALSLGLTPNFKSNFDLAEDAKLQLSKDTYDDDLDNLLAQIGDQYADLFLAAKNLSDAILLSDILRVNTEITKAPLSASMIKRYDEHHQDLTLLKALVRQQLPEKYKEIFFDQSKNGYAGYIDGGASQEEFYKFIKPILEKMDGTEELLVKLNREDLLRKQRTFDNGSIPHQIHLGELHAILRRQEDFYPFLKDNREKIEKILTFRIPYYVGPLARGNSRFAWMTRKSEETITPWNFEEVVDKGASAQSFIERMTNFDKNLPNEKVLPKHSLLYEYFTVYNELTKVKYVTEGMRKPAFLSGEQKKAIVDLLFKTNRKVTVKQLKEDYFKKIECFDSVEISGVEDRFNASLGTYHDLLKIIKDKDFLDNEENEDILEDIVLTLTLFEDREMIEERLKTYAHLFDDKVMKQLKRRRYTGWGRLSRKLINGIRDKQSGKTILDFLKSDGFANRNFMQLIHDDSLTFKEDIQKAQVSGQGDSLHEHIANLAGSPAIKKGILQTVKVVDELVKVMGRHKPENIVIEMARENQTTQKGQKNSRERMKRIEEGIKELGSQILKEHPVENTQLQNEKLYLYYLQNGRDMYVDQELDINRLSDYDVDHIVPQSFLKDDSIDNKVLTRSDKNRGKSDNVPSEEVVKKMKNYWRQLLNAKLITQRKFDNLTKAERGGLSELDKAGFIKRQLVETRQITKHVAQILDSRMNTKYDENDKLIREVKVITLKSKLVSDFRKDFQFYKVREINNYHHAHDAYLNAVVGTALIKKYPKLESEFVYGDYKVYDVRKMIAKSEQEGADKRTADGSEFESPKKKRKV

SEQ ID NO: 332 - protein, 1807 aa, synthetic construct
  REGION 1..1807: note = pNMG-357_ABE8.14 with NGC PAMCP5 polypeptide sequence
  REGION 1..174: note = MISC_FEATURE - Adenosine deaminase sequence
  REGION 175..198: note = MISC_FEATURE - Linker sequence
  REGION 199..365: note = MISC_FEATURE - Adenosine deaminase sequence
  REGION 366..397: note = MISC_FEATURE - Linker sequence
  REGION 398..738: note = MISC_FEATURE - Sequence derived from Cas9
  REGION 739..759: note = MISC_FEATURE - Linker sequence
  REGION 760..1785: note = MISC_FEATURE - Sequence derived from Cas9
  REGION 1786..1807: note = MISC_FEATURE - Bipartite nuclear localization sequence
MSEVEFSHEYWMRHALTLAKRAWDEREVPVGAVLVHNNRVIGEGWNRPIGRHDPTAHAEIMALRQGGLVMQNYRLIDATLYVTLEPCVMCAGAMIHSRIGRVVFGARDAKTGAAGSLMDVLHHPGMNHRVEITEGILADECAALLSDFFRMRRQEIKAQKKAQSSTDGGSSGGSSGSETPGTSESATPESSGGSSGGSMSEVEFSHEYWMRHALTLAKRARDEREVPVGAVLVLNNRVIGEGWNRAIGLHDPTAHAEIMALRQGGLVMQNYRLIDATLYVTFEPCVMCAGAMIHSRIGRVVFGVRNAKTGAAGSLMDVLHYPGMNHRVEITEGILADECAALLCTFFRMPRQVFNAQKKAQSSTDSGGSSGGSSGSETPGTSESATPESSGGSSGGSEIGKATAKYFFYSNIMNFFKTEITLANGEIRKRPLIETNGETGEIVWDKGRDFATVRKVLSMPQVNIVKKTEVQTGGFSKESILPKRNSDKLIARKKDWDPKKYGGFMQPTVAYSVLVVAKVEKGKSKKLKSVKELLGITIMERSSFEKNPIDFLEAKGYKEVKKDLIIKLPKYSLFELENGRKRMLASAKFLQKGNELALPSKYVNFLYLASHYEKLKGSPEDNEQKQLFVEQHKHYLDEIIEQISEFSKRVILADANLDKVLSAYNKHRDKPIREQAENIIHLFTLTNLGAPRAFKYFDTTIARKEYRSTKEVLDATLIHQSITGLYETRIDLSQLGGDGGSGGSGGSGGSGGSGGSGGMDKKYSIGLAIGTNSVGWAVITDEYKVPSKKFKVLGNTDRHSIKKNLIGALLFDSGETAEATRLKRTARRRYTRRKNRICYLQEIFSNEMAKVDDSFFHRLEESFLVEEDKKHERHPIFGNIVDEVAYHEKYPTIYHLRKKLVDSTDKADLRLIYLALAHMIKFRGHFLIEGDLNPDNSDVDKLFIQLVQTYNQLFEENPINASGVDAKAILSARLSKSRRLENLIAQLPGEKKNGLFGNLIALSLGLTPNFKSNFDLAEDAKLQLSKDTYDDDLDNLLAQIGDQYADLFLAAKNLSDAILLSDILRVNTEITKAPLSASMIKRYDEHHQDLTLLKALVRQQLPEKYKEIFFDQSKNGYAGYIDGGASQEEFYKFIKPILEKMDGTEELLVKLNREDLLRKQRTFDNGSIPHQIHLGELHAILRRQEDFYPFLKDNREKIEKILTFRIPYYVGPLARGNSRFAWMTRKSEETITPWNFEEVVDKGASAQSFIERMTNFDKNLPNEKVLPKHSLLYEYFTVYNELTKVKYVTEGMRKPAFLSGEQKKAIVDLLFKTNRKVTVKQLKEDYFKKIECFDSVEISGVEDRFNASLGTYHDLLKIIKDKDFLDNEENEDILEDIVLTLTLFEDREMIEERLKTYAHLFDDKVMKQLKRRRYTGWGRLSRKLINGIRDKQSGKTILDFLKSDGFANRNFMQLIHDDSLTFKEDIQKAQVSGQGDSLHEHIANLAGSPAIKKGILQTVKVVDELVKVMGRHKPENIVIEMARENQTTQKGQKNSRERMKRIEEGIKELGSQILKEHPVENTQLQNEKLYLYYLQNGRDMYVDQELDINRLSDYDVDHIVPQSFLKDDSIDNKVLTRSDKNRGKSDNVPSEEVVKKMKNYWRQLLNAKLITQRKFDNLTKAERGGLSELDKAGFIKRQLVETRQITKHVAQILDSRMNTKYDENDKLIREVKVITLKSKLVSDFRKDFQFYKVREINNYHHAHDAYLNAVVGTALIKKYPKLESEFVYGDYKVYDVRKMIAKSEQEGADKRTADGSEFESPKKKRKV

SEQ ID NO: 333 - protein, 1588 aa, synthetic construct
  REGION 1..1588: note = ABE8.8-m polypeptide sequence
  REGION 1..167: note = MISC_FEATURE - Adenosine deaminase sequence
  REGION 168..199: note = MISC_FEATURE - Linker sequence
  REGION 200..1566: note = MISC_FEATURE - Sequence derived from Cas9
  REGION 1567..1588: note = MISC_FEATURE - Bipartite nuclear localization sequence
MSEVEFSHEYWMRHALTLAKRARDEREVPVGAVLVLNNRVIGEGWNRAIGLHDPTAHAEIMALRQGGLVMQNYRLIDATLYVTFEPCVMCAGAMIHSRIGRVVFGVRNAKTGAAGSLMDVLHHPGMNHRVEITEGILADECAALLCRFFRMPRRVFNAQKKAQSSTDSGGSSGGSSGSETPGTSESATPESSGGSSGGSDKKYSIGLAIGTNSVGWAVITDEYKVPSKKFKVLGNTDRHSIKKNLIGALLFDSGETAEATRLKRTARRRYTRRKNRICYLQEIFSNEMAKVDDSFFHRLEESFLVEEDKKHERHPIFGNIVDEVAYHEKYPTIYHLRKKLVDSTDKADLRLIYLALAHMIKFRGHFLIEGDLNPDNSDVDKLFIQLVQTYNQLFEENPINASGVDAKAILSARLSKSRRLENLIAQLPGEKKNGLFGNLIALSLGLTPNFKSNFDLAEDAKLQLSKDTYDDDLDNLLAQIGDQYADLFLAAKNLSDAILLSDILRVNTEITKAPLSASMIKRYDEHHQDLTLLKALVRQQLPEKYKEIFFDQSKNGYAGYIDGGASQEEFYKFIKPILEKMDGTEELLVKLNREDLLRKQRTFDNGSIPHQIHLGELHAILRRQEDFYPFLKDNREKIEKILTFRIPYYVGPLARGNSRFAWMTRKSEETITPWNFEEVVDKGASAQSFIERMTNFDKNLPNEKVLPKHSLLYEYFTVYNELTKVKYVTEGMRKPAFLSGEQKKAIVDLLFKTNRKVTVKQLKEDYFKKIECFDSVEISGVEDRFNASLGTYHDLLKIIKDKDFLDNEENEDILEDIVLTLTLFEDREMIEERLKTYAHLFDDKVMKQLKRRRYTGWGRLSRKLINGIRDKQSGKTILDFLKSDGFANRNFMQLIHDDSLTFKEDIQKAQVSGQGDSLHEHIANLAGSPAIKKGILQTVKVVDELVKVMGRHKPENIVIEMARENQTTQKGQKNSRERMKRIEEGIKELGSQILKEHPVENTQLQNEKLYLYYLQNGRDMYVDQELDINRLSDYDVDHIVPQSFLKDDSIDNKVLTRSDKNRGKSDNVPSEEVVKKMKNYWRQLLNAKLITQRKFDNLTKAERGGLSELDKAGFIKRQLVETRQITKHVAQILDSRMNTKYDENDKLIREVKVITLKSKLVSDFRKDFQFYKVREINNYHHAHDAYLNAVVGTALIKKYPKLESEFVYGDYKVYDVRKMIAKSEQEIGKATAKYFFYSNIMNFFKTEITLANGEIRKRPLIETNGETGEIVWDKGRDFATVRKVLSMPQVNIVKKTEVQTGGFSKESILPKRNSDKLIARKKDWDPKKYGGFDSPTVAYSVLVVAKVEKGKSKKLKSVKELLGITIMERSSFEKNPIDFLEAKGYKEVKKDLIIKLPKYSLFELENGRKRMLASAGELQKGNELALPSKYVNFLYLASHYEKLKGSPEDNEQKQLFVEQHKHYLDEIIEQISEFSKRVILADANLDKVLSAYNKHRDKPIREQAENIIHLFTLTNLGAPAAFKYFDTTIDRKRYTSTKEVLDATLIHQSITGLYETRIDLSQLGGDEGADKRTADGSEFESPKKKRKV

SEQ ID NO: 334 - protein, 1786 aa, synthetic construct
  REGION 1..1786: note = ABE8.8-d polypeptide sequence
  REGION 1..167: note = MISC_FEATURE - Adenosine deaminase sequence
  REGION 168..199: note = MISC_FEATURE - Linker sequence
  REGION 200..365: note = MISC_FEATURE - Adenosine deaminase sequence
  REGION 366..397: note = MISC_FEATURE - Linker sequence
  REGION 398..1764: note = MISC_FEATURE - Sequence derived from Cas9
  REGION 1765..1786: note = MISC_FEATURE - Bipartite nuclear localization sequence
MSEVEFSHEYWMRHALTLAKRAWDEREVPVGAVLVHNNRVIGEGWNRPIGRHDPTAHAEIMALRQGGLVMQNYRLIDATLYVTLEPCVMCAGAMIHSRIGRVVFGARDAKTGAAGSLMDVLHHPGMNHRVEITEGILADECAALLSDFFRMRRQEIKAQKKAQSSTDSGGSSGGSSGSETPGTSESATPESSGGSSGGSSEVEFSHEYWMRHALTLAKRARDEREVPVGAVLVLNNRVIGEGWNRAIGLHDPTAHAEIMALRQGGLVMQNYRLIDATLYVTFEPCVMCAGAMIHSRIGRVVFGVRNAKTGAAGSLMDVLHHPGMNHRVEITEGILADECAALLCRFFRMPRRVFNAQKKAQSSTDSGGSSGGSSGSETPGTSESATPESSGGSSGGSDKKYSIGLAIGTNSVGWAVITDEYKVPSKKFKVLGNTDRHSIKKNLIGALLFDSGETAEATRLKRTARRRYTRRKNRICYLQEIFSNEMAKVDDSFFHRLEESFLVEEDKKHERHPIFGNIVDEVAYHEKYPTIYHLRKKLVDSTDKADLRLIYLALAHMIKFRGHFLIEGDLNPDNSDVDKLFIQLVQTYNQLFEENPINASGVDAKAILSARLSKSRRLENLIAQLPGEKKNGLFGNLIALSLGLTPNFKSNFDLAEDAKLQLSKDTYDDDLDNLLAQIGDQYADLFLAAKNLSDAILLSDILRVNTEITKAPLSASMIKRYDEHHQDLTLLKALVRQQLPEKYKEIFFDQSKNGYAGYIDGGASQEEFYKFIKPILEKMDGTEELLVKLNREDLLRKQRTFDNGSIPHQIHLGELHAILRRQEDFYPFLKDNREKIEKILTFRIPYYVGPLARGNSRFAWMTRKSEETITPWNFEEVVDKGASAQSFIERMTNFDKNLPNEKVLPKHSLLYEYFTVYNELTKVKYVTEGMRKPAFLSGEQKKAIVDLLFKTNRKVTVKQLKEDYFKKIECFDSVEISGVEDRFNASLGTYHDLLKIIKDKDFLDNEENEDILEDIVLTLTLFEDREMIEERLKTYAHLFDDKVMKQLKRRRYTGWGRLSRKLINGIRDKQSGKTILDFLKSDGFANRNFMQLIHDDSLTFKEDIQKAQVSGQGDSLHEHIANLAGSPAIKKGILQTVKVVDELVKVMGRHKPENIVIEMARENQTTQKGQKNSRERMKRIEEGIKELGSQILKEHPVENTQLQNEKLYLYYLQNGRDMYVDQELDINRLSDYDVDHIVPQSFLKDDSIDNKVLTRSDKNRGKSDNVPSEEVVKKMKNYWRQLLNAKLITQRKFDNLTKAERGGLSELDKAGFIKRQLVETRQITKHVAQILDSRMNTKYDENDKLIREVKVITLKSKLVSDFRKDFQFYKVREINNYHHAHDAYLNAVVGTALIKKYPKLESEFVYGDYKVYDVRKMIAKSEQEIGKATAKYFFYSNIMNFFKTEITLANGEIRKRPLIETNGETGEIVWDKGRDFATVRKVLSMPQVNIVKKTEVQTGGFSKESILPKRNSDKLIARKKDWDPKKYGGFDSPTVAYSVLVVAKVEKGKSKKLKSVKELLGITIMERSSFEKNPIDFLEAKGYKEVKKDLIIKLPKYSLFELENGRKRMLASAGELQKGNELALPSKYVNFLYLASHYEKLKGSPEDNEQKQLFVEQHKHYLDEIIEQISEFSKRVILADANLDKVLSAYNKHRDKPIREQAENIIHLFTLTNLGAPAAFKYFDTTIDRKRYTSTKEVLDATLIHQSITGLYETRIDLSQLGGDEGADKRTADGSEFESPKKKRKV

SEQ ID NO: 335 - protein, 1588 aa, synthetic construct
  REGION 1..1588: note = ABE8.13-m polypeptide sequence
  REGION 1..167: note = MISC_FEATURE - Adenosine deaminase sequence
  REGION 168..199: note = MISC_FEATURE - Linker sequence
  REGION 200..1566: note = MISC_FEATURE - Sequence derived from Cas9
  REGION 1567..1588: note = MISC_FEATURE - Bipartite nuclear localization sequence
MSEVEFSHEYWMRHALTLAKRARDEREVPVGAVLVLNNRVIGEGWNRAIGLHDPTAHAEIMALRQGGLVMQNYRLYDATLYVTFEPCVMCAGAMIHSRIGRVVFGVRNAKTGAAGSLMDVLHHPGMNHRVEITEGILADECAALLCRFFRMPRRVFNAQKKAQSSTDSGGSSGGSSGSETPGTSESATPESSGGSSGGSDKKYSIGLAIGTNSVGWAVITDEYKVPSKKFKVLGNTDRHSIKKNLIGALLFDSGETAEATRLKRTARRRYTRRKNRICYLQEIFSNEMAKVDDSFFHRLEESFLVEEDKKHERHPIFGNIVDEVAYHEKYPTIYHLRKKLVDSTDKADLRLIYLALAHMIKFRGHFLIEGDLNPDNSDVDKLFIQLVQTYNQLFEENPINASGVDAKAILSARLSKSRRLENLIAQLPGEKKNGLFGNLIALSLGLTPNFKSNFDLAEDAKLQLSKDTYDDDLDNLLAQIGDQYADLFLAAKNLSDAILLSDILRVNTEITKAPLSASMIKRYDEHHQDLTLLKALVRQQLPEKYKEIFFDQSKNGYAGYIDGGASQEEFYKFIKPILEKMDGTEELLVKLNREDLLRKQRTFDNGSIPHQIHLGELHAILRRQEDFYPFLKDNREKIEKILTFRIPYYVGPLARGNSRFAWMTRKSEETITPWNFEEVVDKGASAQSFIERMTNFDKNLPNEKVLPKHSLLYEYFTVYNELTKVKYVTEGMRKPAFLSGEQKKAIVDLLFKTNRKVTVKQLKEDYFKKIECFDSVEISGVEDRFNASLGTYHDLLKIIKDKDFLDNEENEDILEDIVLTLTLFEDREMIEERLKTYAHLFDDKVMKQLKRRRYTGWGRLSRKLINGIRDKQSGKTILDFLKSDGFANRNFMQLIHDDSLTFKEDIQKAQVSGQGDSLHEHIANLAGSPAIKKGILQTVKVVDELVKVMGRHKPENIVIEMARENQTTQKGQKNSRERMKRIEEGIKELGSQILKEHPVENTQLQNEKLYLYYLQNGRDMYVDQELDINRLSDYDVDHIVPQSFLKDDSIDNKVLTRSDKNRGKSDNVPSEEVVKKMKNYWRQLLNAKLITQRKFDNLTKAERGGLSELDKAGFIKRQLVETRQITKHVAQILDSRMNTKYDENDKLIREVKVITLKSKLVSDFRKDFQFYKVREINNYHHAHDAYLNAVVGTALIKKYPKLESEFVYGDYKVYDVRKMIAKSEQEIGKATAKYFFYSNIMNFFKTEITLANGEIRKRPLIETNGETGEIVWDKGRDFATVRKVLSMPQVNIVKKTEVQTGGFSKESILPKRNSDKLIARKKDWDPKKYGGFDSPTVAYSVLVVAKVEKGKSKKLKSVKELLGITIMERSSFEKNPIDFLEAKGYKEVKKDLIIKLPKYSLFELENGRKRMLASAGELQKGNELALPSKYVNFLYLASHYEKLKGSPEDNEQKQLFVEQHKHYLDEIIEQISEFSKRVILADANLDKVLSAYNKHRDKPIREQAENIIHLFTLTNLGAPAAFKYFDTTIDRKRYTSTKEVLDATLIHQSITGLYETRIDLSQLGGDEGADKRTADGSEFESPKKKRKV

SEQ ID NO: 336 - protein, 1786 aa, synthetic construct
  REGION 1..1786: note = ABE8.13-d polypeptide sequence
  REGION 1..167: note = MISC_FEATURE - Adenosine deaminase sequence
  REGION 168..199: note = MISC_FEATURE - Linker sequence
  REGION 200..365: note = MISC_FEATURE - Adenosine deaminase sequence
  REGION 366..397: note = MISC_FEATURE - Linker sequence
  REGION 398..1764: note = MISC_FEATURE - Sequence derived from Cas9
  REGION 1765..1786: note = MISC_FEATURE - Bipartite nuclear localization sequence
MSEVEFSHEYWMRHALTLAKRAWDEREVPVGAVLVHNNRVIGEGWNRPIGRHDPTAHAEIMALRQGGLVMQNYRLIDATLYVTLEPCVMCAGAMIHSRIGRVVFGARDAKTGAAGSLMDVLHHPGMNHRVEITEGILADECAALLSDFFRMRRQEIKAQKKAQSSTDSGGSSGGSSGSETPGTSESATPESSGGSSGGSSEVEFSHEYWMRHALTLAKRARDEREVPVGAVLVLNNRVIGEGWNRAIGLHDPTAHAEIMALRQGGLVMQNYRLYDATLYVTFEPCVMCAGAMIHSRIGRVVFGVRNAKTGAAGSLMDVLHHPGMNHRVEITEGILADECAALLCRFFRMPRRVFNAQKKAQSSTDSGGSSGGSSGSETPGTSESATPESSGGSSGGSDKKYSIGLAIGTNSVGWAVITDEYKVPSKKFKVLGNTDRHSIKKNLIGALLFDSGETAEATRLKRTARRRYTRRKNRICYLQEIFSNEMAKVDDSFFHRLEESFLVEEDKKHERHPIFGNIVDEVAYHEKYPTIYHLRKKLVDSTDKADLRLIYLALAHMIKFRGHFLIEGDLNPDNSDVDKLFIQLVQTYNQLFEENPINASGVDAKAILSARLSKSRRLENLIAQLPGEKKNGLFGNLIALSLGLTPNFKSNFDLAEDAKLQLSKDTYDDDLDNLLAQIGDQYADLFLAAKNLSDAILLSDILRVNTEITKAPLSASMIKRYDEHHQDLTLLKALVRQQLPEKYKEIFFDQSKNGYAGYIDGGASQEEFYKFIKPILEKMDGTEELLVKLNREDLLRKQRTFDNGSIPHQIHLGELHAILRRQEDFYPFLKDNREKIEKILTFRIPYYVGPLARGNSRFAWMTRKSEETITPWNFEEVVDKGASAQSFIERMTNFDKNLPNEKVLPKHSLLYEYFTVYNELTKVKYVTEGMRKPAFLSGEQKKAIVDLLFKTNRKVTVKQLKEDYFKKIECFDSVEISGVEDRFNASLGTYHDLLKIIKDKDFLDNEENEDILEDIVLTLTLFEDREMIEERLKTYAHLFDDKVMKQLKRRRYTGWGRLSRKLINGIRDKQSGKTILDFLKSDGFANRNFMQLIHDDSLTFKEDIQKAQVSGQGDSLHEHIANLAGSPAIKKGILQTVKVVDELVKVMGRHKPENIVIEMARENQTTQKGQKNSRERMKRIEEGIKELGSQILKEHPVENTQLQNEKLYLYYLQNGRDMYVDQELDINRLSDYDVDHIVPQSFLKDDSIDNKVLTRSDKNRGKSDNVPSEEVVKKMKNYWRQLLNAKLITQRKFDNLTKAERGGLSELDKAGFIKRQLVETRQITKHVAQILDSRMNTKYDENDKLIREVKVITLKSKLVSDFRKDFQFYKVREINNYHHAHDAYLNAVVGTALIKKYPKLESEFVYGDYKVYDVRKMIAKSEQEIGKATAKYFFYSNIMNFFKTEITLANGEIRKRPLIETNGETGEIVWDKGRDFATVRKVLSMPQVNIVKKTEVQTGGFSKESILPKRNSDKLIARKKDWDPKKYGGFDSPTVAYSVLVVAKVEKGKSKKLKSVKELLGITIMERSSFEKNPIDFLEAKGYKEVKKDLIIKLPKYSLFELENGRKRMLASAGELQKGNELALPSKYVNFLYLASHYEKLKGSPEDNEQKQLFVEQHKHYLDEIIEQISEFSKRVILADANLDKVLSAYNKHRDKPIREQAENIIHLFTLTNLGAPAAFKYFDTTIDRKRYTSTKEVLDATLIHQSITGLYETRIDLSQLGGDEGADKRTADGSEFESPKKKRKV

SEQ ID NO: 337 - protein, 1588 aa, synthetic construct
  REGION 1..1588: note = ABE8.17-m polypeptide sequence
  REGION 1..167: note = MISC_FEATURE - Adenosine deaminase sequence
  REGION 168..199: note = MISC_FEATURE - Linker sequence
  REGION 200..1566: note = MISC_FEATURE - Sequence derived from Cas9
  REGION 1567..1588: note = MISC_FEATURE - Bipartite nuclear localization sequence
MSEVEFSHEYWMRHALTLAKRARDEREVPVGAVLVLNNRVIGEGWNRAIGLHDPTAHAEIMALRQGGLVMQNYRLIDATLYSTFEPCVMCAGAMIHSRIGRVVFGVRNAKTGAAGSLMDVLHYPGMNHRVEITEGILADECAALLCYFFRMPRRVFNAQKKAQSSTDSGGSSGGSSGSETPGTSESATPESSGGSSGGSDKKYSIGLAIGTNSVGWAVITDEYKVPSKKFKVLGNTDRHSIKKNLIGALLFDSGETAEATRLKRTARRRYTRRKNRICYLQEIFSNEMAKVDDSFFHRLEESFLVEEDKKHERHPIFGNIVDEVAYHEKYPTIYHLRKKLVDSTDKADLRLIYLALAHMIKFRGHFLIEGDLNPDNSDVDKLFIQLVQTYNQLFEENPINASGVDAKAILSARLSKSRRLENLIAQLPGEKKNGLFGNLIALSLGLTPNFKSNFDLAEDAKLQLSKDTYDDDLDNLLAQIGDQYADLFLAAKNLSDAILLSDILRVNTEITKAPLSASMIKRYDEHHQDLTLLKALVRQQLPEKYKEIFFDQSKNGYAGYIDGGASQEEFYKFIKPILEKMDGTEELLVKLNREDLLRKQRTFDNGSIPHQIHLGELHAILRRQEDFYPFLKDNREKIEKILTFRIPYYVGPLARGNSRFAWMTRKSEETITPWNFEEVVDKGASAQSFIERMTNFDKNLPNEKVLPKHSLLYEYFTVYNELTKVKYVTEGMRKPAFLSGEQKKAIVDLLFKTNRKVTVKQLKEDYFKKIECFDSVEISGVEDRFNASLGTYHDLLKIIKDKDFLDNEENEDILEDIVLTLTLFEDREMIEERLKTYAHLFDDKVMKQLKRRRYTGWGRLSRKLINGIRDKQSGKTILDFLKSDGFANRNFMQLIHDDSLTFKEDIQKAQVSGQGDSLHEHIANLAGSPAIKKGILQTVKVVDELVKVMGRHKPENIVIEMARENQTTQKGQKNSRERMKRIEEGIKELGSQILKEHPVENTQLQNEKLYLYYLQNGRDMYVDQELDINRLSDYDVDHIVPQSFLKDDSIDNKVLTRSDKNRGKSDNVPSEEVVKKMKNYWRQLLNAKLITQRKFDNLTKAERGGLSELDKAGFIKRQLVETRQITKHVAQILDSRMNTKYDENDKLIREVKVITLKSKLVSDFRKDFQFYKVREINNYHHAHDAYLNAVVGTALIKKYPKLESEFVYGDYKVYDVRKMIAKSEQEIGKATAKYFFYSNIMNFFKTEITLANGEIRKRPLIETNGETGEIVWDKGRDFATVRKVLSMPQVNIVKKTEVQTGGFSKESILPKRNSDKLIARKKDWDPKKYGGFDSPTVAYSVLVVAKVEKGKSKKLKSVKELLGITIMERSSFEKNPIDFLEAKGYKEVKKDLIIKLPKYSLFELENGRKRMLASAGELQKGNELALPSKYVNFLYLASHYEKLKGSPEDNEQKQLFVEQHKHYLDEIIEQISEFSKRVILADANLDKVLSAYNKHRDKPIREQAENIIHLFTLTNLGAPAAFKYFDTTIDRKRYTSTKEVLDATLIHQSITGLYETRIDLSQLGGDEGADKRTADGSEFESPKKKRKV

SEQ ID NO: 338 - protein, 1786 aa, synthetic construct
  REGION 1..1786: note = ABE8.17-d polypeptide sequence
  REGION 1..167: note = MISC_FEATURE - Adenosine deaminase sequence
  REGION 168..199: note = MISC_FEATURE - Linker sequence
  REGION 200..365: note = MISC_FEATURE - Adenosine deaminase sequence
  REGION 366..397: note = MISC_FEATURE - Linker sequence
  REGION 398..1764: note = MISC_FEATURE - Sequence derived from Cas9
  REGION 1765..1786: note = MISC_FEATURE - Bipartite nuclear localization sequence
MSEVEFSHEYWMRHALTLAKRAWDEREVPVGAVLVHNNRVIGEGWNRPIGRHDPTAHAEIMALRQGGLVMQNYRLIDATLYVTLEPCVMCAGAMIHSRIGRVVFGARDAKTGAAGSLMDVLHHPGMNHRVEITEGILADECAALLSDFFRMRRQEIKAQKKAQSSTDSGGSSGGSSGSETPGTSESATPESSGGSSGGSSEVEFSHEYWMRHALTLAKRARDEREVPVGAVLVLNNRVIGEGWNRAIGLHDPTAHAEIMALRQGGLVMQNYRLIDATLYSTFEPCVMCAGAMIHSRIGRVVFGVRNAKTGAAGSLMDVLHYPGMNHRVEITEGILADECAALLCYFFRMPRRVFNAQKKAQSSTDSGGSSGGSSGSETPGTSESATPESSGGSSGGSDKKYSIGLAIGTNSVGWAVITDEYKVPSKKFKVLGNTDRHSIKKNLIGALLFDSGETAEATRLKRTARRRYTRRKNRICYLQEIFSNEMAKVDDSFFHRLEESFLVEEDKKHERHPIFGNIVDEVAYHEKYPTIYHLRKKLVDSTDKADLRLIYLALAHMIKFRGHFLIEGDLNPDNSDVDKLFIQLVQTYNQLFEENPINASGVDAKAILSARLSKSRRLENLIAQLPGEKKNGLFGNLIALSLGLTPNFKSNFDLAEDAKLQLSKDTYDDDLDNLLAQIGDQYADLFLAAKNLSDAILLSDILRVNTEITKAPLSASMIKRYDEHHQDLTLLKALVRQQLPEKYKEIFFDQSKNGYAGYIDGGASQEEFYKFIKPILEKMDGTEELLVKLNREDLLRKQRTFDNGSIPHQIHLGELHAILRRQEDFYPFLKDNREKIEKILTFRIPYYVGPLARGNSRFAWMTRKSEETITPWNFEEVVDKGASAQSFIERMTNFDKNLPNEKVLPKHSLLYEYFTVYNELTKVKYVTEGMRKPAFLSGEQKKAIVDLLFKTNRKVTVKQLKEDYFKKIECFDSVEISGVEDRFNASLGTYHDLLKIIKDKDFLDNEENEDILEDIVLTLTLFEDREMIEERLKTYAHLFDDKVMKQLKRRRYTGWGRLSRKLINGIRDKQSGKTILDFLKSDGFANRNFMQLIHDDSLTFKEDIQKAQVSGQGDSLHEHIANLAGSPAIKKGILQTVKVVDELVKVMGRHKPENIVIEMARENQTTQKGQKNSRERMKRIEEGIKELGSQILKEHPVENTQLQNEKLYLYYLQNGRDMYVDQELDINRLSDYDVDHIVPQSFLKDDSIDNKVLTRSDKNRGKSDNVPSEEVVKKMKNYWRQLLNAKLITQRKFDNLTKAERGGLSELDKAGFIKRQLVETRQITKHVAQILDSRMNTKYDENDKLIREVKVITLKSKLVSDFRKDFQFYKVREINNYHHAHDAYLNAVVGTALIKKYPKLESEFVYGDYKVYDVRKMIAKSEQEIGKATAKYFFYSNIMNFFKTEITLANGEIRKRPLIETNGETGEIVWDKGRDFATVRKVLSMPQVNIVKKTEVQTGGFSKESILPKRNSDKLIARKKDWDPKKYGGFDSPTVAYSVLVVAKVEKGKSKKLKSVKELLGITIMERSSFEKNPIDFLEAKGYKEVKKDLIIKLPKYSLFELENGRKRMLASAGELQKGNELALPSKYVNFLYLASHYEKLKGSPEDNEQKQLFVEQHKHYLDEIIEQISEFSKRVILADANLDKVLSAYNKHRDKPIREQAENIIHLFTLTNLGAPAAFKYFDTTIDRKRYTSTKEVLDATLIHQSITGLYETRIDLSQLGGDEGADKRTADGSEFESPKKKRKV

SEQ ID NO: 339 - protein, 1588 aa, synthetic construct
  REGION 1..1588: note = ABE8.20-m polypeptide sequence
  REGION 1..167: note = MISC_FEATURE - Adenosine deaminase sequence
  REGION 168..199: note = MISC_FEATURE - Linker sequence
  REGION 200..1566: note = MISC_FEATURE - Sequence derived from Cas9
  REGION 1567..1588: note = MISC_FEATURE - Bipartite nuclear localization sequence
MSEVEFSHEYWMRHALTLAKRARDEREVPVGAVLVLNNRVIGEGWNRAIGLHDPTAHAEIMALRQGGLVMQNYRLYDATLYSTFEPCVMCAGAMIHSRIGRVVFGVRNAKTGAAGSLMDVLHHPGMNHRVEITEGILADECAALLCRFFRMPRRVFNAQKKAQSSTDSGGSSGGSSGSETPGTSESATPESSGGSSGGSDKKYSIGLAIGTNSVGWAVITDEYKVPSKKFKVLGNTDRHSIKKNLIGALLFDSGETAEATRLKRTARRRYTRRKNRICYLQEIFSNEMAKVDDSFFHRLEESFLVEEDKKHERHPIFGNIVDEVAYHEKYPTIYHLRKKLVDSTDKADLRLIYLALAHMIKFRGHFLIEGDLNPDNSDVDKLFIQLVQTYNQLFEENPINASGVDAKAILSARLSKSRRLENLIAQLPGEKKNGLFGNLIALSLGLTPNFKSNFDLAEDAKLQLSKDTYDDDLDNLLAQIGDQYADLFLAAKNLSDAILLSDILRVNTEITKAPLSASMIKRYDEHHQDLTLLKALVRQQLPEKYKEIFFDQSKNGYAGYIDGGASQEEFYKFIKPILEKMDGTEELLVKLNREDLLRKQRTFDNGSIPHQIHLGELHAILRRQEDFYPFLKDNREKIEKILTFRIPYYVGPLARGNSRFAWMTRKSEETITPWNFEEVVDKGASAQSFIERMTNFDKNLPNEKVLPKHSLLYEYFTVYNELTKVKYVTEGMRKPAFLSGEQKKAIVDLLFKTNRKVTVKQLKEDYFKKIECFDSVEISGVEDRFNASLGTYHDLLKIIKDKDFLDNEENEDILEDIVLTLTLFEDREMIEERLKTYAHLFDDKVMKQLKRRRYTGWGRLSRKLINGIRDKQSGKTILDFLKSDGFANRNFMQLIHDDSLTFKEDIQKAQVSGQGDSLHEHIANLAGSPAIKKGILQTVKVVDELVKVMGRHKPENIVIEMARENQTTQKGQKNSRERMKRIEEGIKELGSQILKEHPVENTQLQNEKLYLYYLQNGRDMYVDQELDINRLSDYDVDHIVPQSFLKDDSIDNKVLTRSDKNRGKSDNVPSEEVVKKMKNYWRQLLNAKLITQRKFDNLTKAERGGLSELDKAGFIKRQLVETRQITKHVAQILDSRMNTKYDENDKLIREVKVITLKSKLVSDFRKDFQFYKVREINNYHHAHDAYLNAVVGTALIKKYPKLESEFVYGDYKVYDVRKMIAKSEQEIGKATAKYFFYSNIMNFFKTEITLANGEIRKRPLIETNGETGEIVWDKGRDFATVRKVLSMPQVNIVKKTEVQTGGFSKESILPKRNSDKLIARKKDWDPKKYGGFDSPTVAYSVLVVAKVEKGKSKKLKSVKELLGITIMERSSFEKNPIDFLEAKGYKEVKKDLIIKLPKYSLFELENGRKRMLASAGELQKGNELALPSKYVNFLYLASHYEKLKGSPEDNEQKQLFVEQHKHYLDEIIEQISEFSKRVILADANLDKVLSAYNKHRDKPIREQAENIIHLFTLTNLGAPAAFKYFDTTIDRKRYTSTKEVLDATLIHQSITGLYETRIDLSQLGGDEGADKRTADGSEFESPKKKRKV

SEQ ID NO: 340 - protein, 1786 aa, synthetic construct
  REGION 1..1786: note = ABE8.20-d polypeptide sequence
  REGION 1..167: note = MISC_FEATURE - Adenosine deaminase sequence
  REGION 168..199: note = MISC_FEATURE - Linker sequence
  REGION 200..365: note = MISC_FEATURE - Adenosine deaminase sequence
  REGION 366..397: note = MISC_FEATURE - Linker sequence
  REGION 398..1764: note = MISC_FEATURE - Sequence derived from Cas9
  REGION 1765..1786: note = MISC_FEATURE - Bipartite nuclear localization sequence
MSEVEFSHEYWMRHALTLAKRAWDEREVPVGAVLVHNNRVIGEGWNRPIGRHDPTAHAEIMALRQGGLVMQNYRLIDATLYVTLEPCVMCAGAMIHSRIGRVVFGARDAKTGAAGSLMDVLHHPGMNHRVEITEGILADECAALLSDFFRMRRQEIKAQKKAQSSTDSGGSSGGSSGSETPGTSESATPESSGGSSGGSSEVEFSHEYWMRHALTLAKRARDEREVPVGAVLVLNNRVIGEGWNRAIGLHDPTAHAEIMALRQGGLVMQNYRLYDATLYSTFEPCVMCAGAMIHSRIGRVVFGVRNAKTGAAGSLMDVLHHPGMNHRVEITEGILADECAALLCRFFRMPRRVFNAQKKAQSSTDSGGSSGGSSGSETPGTSESATPESSGGSSGGSDKKYSIGLAIGTNSVGWAVITDEYKVPSKKFKVLGNTDRHSIKKNLIGALLFDSGETAEATRLKRTARRRYTRRKNRICYLQEIFSNEMAKVDDSFFHRLEESFLVEEDKKHERHPIFGNIVDEVAYHEKYPTIYHLRKKLVDSTDKADLRLIYLALAHMIKFRGHFLIEGDLNPDNSDVDKLFIQLVQTYNQLFEENPINASGVDAKAILSARLSKSRRLENLIAQLPGEKKNGLFGNLIALSLGLTPNFKSNFDLAEDAKLQLSKDTYDDDLDNLLAQIGDQYADLFLAAKNLSDAILLSDILRVNTEITKAPLSASMIKRYDEHHQDLTLLKALVRQQLPEKYKEIFFDQSKNGYAGYIDGGASQEEFYKFIKPILEKMDGTEELLVKLNREDLLRKQRTFDNGSIPHQIHLGELHAILRRQEDFYPFLKDNREKIEKILTFRIPYYVGPLARGNSRFAWMTRKSEETITPWNFEEVVDKGASAQSFIERMTNFDKNLPNEKVLPKHSLLYEYFTVYNELTKVKYVTEGMRKPAFLSGEQKKAIVDLLFKTNRKVTVKQLKEDYFKKIECFDSVEISGVEDRFNASLGTYHDLLKIIKDKDFLDNEENEDILEDIVLTLTLFEDREMIEERLKTYAHLFDDKVMKQLKRRRYTGWGRLSRKLINGIRDKQSGKTILDFLKSDGFANRNFMQLIHDDSLTFKEDIQKAQVSGQGDSLHEHIANLAGSPAIKKGILQTVKVVDELVKVMGRHKPENIVIEMARENQTTQKGQKNSRERMKRIEEGIKELGSQILKEHPVENTQLQNEKLYLYYLQNGRDMYVDQELDINRLSDYDVDHIVPQSFLKDDSIDNKVLTRSDKNRGKSDNVPSEEVVKKMKNYWRQLLNAKLITQRKFDNLTKAERGGLSELDKAGFIKRQLVETRQITKHVAQILDSRMNTKYDENDKLIREVKVITLKSKLVSDFRKDFQFYKVREINNYHHAHDAYLNAVVGTALIKKYPKLESEFVYGDYKVYDVRKMIAKSEQEIGKATAKYFFYSNIMNFFKTEITLANGEIRKRPLIETNGETGEIVWDKGRDFATVRKVLSMPQVNIVKKTEVQTGGFSKESILPKRNSDKLIARKKDWDPKKYGGFDSPTVAYSVLVVAKVEKGKSKKLKSVKELLGITIMERSSFEKNPIDFLEAKGYKEVKKDLIIKLPKYSLFELENGRKRMLASAGELQKGNELALPSKYVNFLYLASHYEKLKGSPEDNEQKQLFVEQHKHYLDEIIEQISEFSKRVILADANLDKVLSAYNKHRDKPIREQAENIIHLFTLTNLGAPAAFKYFDTTIDRKRYTSTKEVLDATLIHQSITGLYETRIDLSQLGGDEGADKRTADGSEFESPKKKRKV

SEQ ID NO: 341 - protein, 1588 aa, synthetic construct
  REGION 1..1588: note = 01. monoABE8.1_bpNLS + Y147T polypeptide sequence
MSEVEFSHEYWMRHALTLAKRARDEREVPVGAVLVLNNRVIGEGWNRAIGLHDPTAHAEIMALRQGGLVMQNYRLIDATLYVTFEPCVMCAGAMIHSRIGRVVFGVRNAKTGAAGSLMDVLHYPGMNHRVEITEGILADECAALLCTFFRMPRQVFNAQKKAQSSTDSGGSSGGSSGSETPGTSESATPESSGGSSGGSDKKYSIGLAIGTNSVGWAVITDEYKVPSKKFKVLGNTDRHSIKKNLIGALLFDSGETAEATRLKRTARRRYTRRKNRICYLQEIFSNEMAKVDDSFFHRLEESFLVEEDKKHERHPIFGNIVDEVAYHEKYPTIYHLRKKLVDSTDKADLRLIYLALAHMIKFRGHFLIEGDLNPDNSDVDKLFIQLVQTYNQLFEENPINASGVDAKAILSARLSKSRRLENLIAQLPGEKKNGLFGNLIALSLGLTPNFKSNFDLAEDAKLQLSKDTYDDDLDNLLAQIGDQYADLFLAAKNLSDAILLSDILRVNTEITKAPLSASMIKRYDEHHQDLTLLKALVRQQLPEKYKEIFFDQSKNGYAGYIDGGASQEEFYKFIKPILEKMDGTEELLVKLNREDLLRKQRTFDNGSIPHQIHLGELHAILRRQEDFYPFLKDNREKIEKILTFRIPYYVGPLARGNSRFAWMTRKSEETITPWNFEEVVDKGASAQSFIERMTNFDKNLPNEKVLPKHSLLYEYFTVYNELTKVKYVTEGMRKPAFLSGEQKKAIVDLLFKTNRKVTVKQLKEDYFKKIECFDSVEISGVEDRFNASLGTYHDLLKIIKDKDFLDNEENEDILEDIVLTLTLFEDREMIEERLKTYAHLFDDKVMKQLKRRRYTGWGRLSRKLINGIRDKQSGKTILDFLKSDGFANRNFMQLIHDDSLTFKEDIQKAQVSGQGDSLHEHIANLAGSPAIKKGILQTVKVVDELVKVMGRHKPENIVIEMARENQTTQKGQKNSRERMKRIEEGIKELGSQILKEHPVENTQLQNEKLYLYYLQNGRDMYVDQELDINRLSDYDVDHIVPQSFLKDDSIDNKVLTRSDKNRGKSDNVPSEEVVKKMKNYWRQLLNAKLITQRKFDNLTKAERGGLSELDKAGFIKRQLVETRQITKHVAQILDSRMNTKYDENDKLIREVKVITLKSKLVSDFRKDFQFYKVREINNYHHAHDAYLNAVVGTALIKKYPKLESEFVYGDYKVYDVRKMIAKSEQEIGKATAKYFFYSNIMNFFKTEITLANGEIRKRPLIETNGETGEIVWDKGRDFATVRKVLSMPQVNIVKKTEVQTGGFSKESILPKRNSDKLIARKKDWDPKKYGGFVSPTVAYSVLVVAKVEKGKSKKLKSVKELLGITIMERSSFEKNPIDFLEAKGYKEVKKDLIIKLPKYSLFELENGRKRMLASARELQKGNELALPSKYVNFLYLASHYEKLKGSPEDNEQKQLFVEQHKHYLDEIIEQISEFSKRVILADANLDKVLSAYNKHRDKPIREQAENIIHLFTLTNLGAPAAFKYFDTTIDRKQYRSTKEVLDATLIHQSITGLYETRIDLSQLGGDEGADKRTADGSEFESPKKKRKV

SEQ ID NO: 342 - protein, 1588 aa, synthetic construct
  REGION 1..1588: note = 02. monoABE8.1_bpNLS + Y147R polypeptide sequence
MSEVEFSHEYWMRHALTLAKRARDEREVPVGAVLVLNNRVIGEGWNRAIGLHDPTAHAEIMALRQGGLVMQNYRLIDATLYVTFEPCVMCAGAMIHSRIGRVVFGVRNAKTGAAGSLMDVLHYPGMNHRVEITEGILADECAALLCRFFRMPRQVFNAQKKAQSSTDSGGSSGGSSGSETPGTSESATPESSGGSSGGSDKKYSIGLAIGTNSVGWAVITDEYKVPSKKFKVLGNTDRHSIKKNLIGALLFDSGETAEATRLKRTARRRYTRRKNRICYLQEIFSNEMAKVDDSFFHRLEESFLVEEDKKHERHPIFGNIVDEVAYHEKYPTIYHLRKKLVDSTDKADLRLIYLALAHMIKFRGHFLIEGDLNPDNSDVDKLFIQLVQTYNQLFEENPINASGVDAKAILSARLSKSRRLENLIAQLPGEKKNGLFGNLIALSLGLTPNFKSNFDLAEDAKLQLSKDTYDDDLDNLLAQIGDQYADLFLAAKNLSDAILLSDILRVNTEITKAPLSASMIKRYDEHHQDLTLLKALVRQQLPEKYKEIFFDQSKNGYAGYIDGGASQEEFYKFIKPILEKMDGTEELLVKLNREDLLRKQRTFDNGSIPHQIHLGELHAILRRQEDFYPFLKDNREKIEKILTFRIPYYVGPLARGNSRFAWMTRKSEETITPWNFEEVVDKGASAQSFIERMTNFDKNLPNEKVLPKHSLLYEYFTVYNELTKVKYVTEGMRKPAFLSGEQKKAIVDLLFKTNRKVTVKQLKEDYFKKIECFDSVEISGVEDRFNASLGTYHDLLKIIKDKDFLDNEENEDILEDIVLTLTLFEDREMIEERLKTYAHLFDDKVMKQLKRRRYTGWGRLSRKLINGIRDKQSGKTILDFLKSDGFANRNFMQLIHDDSLTFKEDIQKAQVSGQGDSLHEHIANLAGSPAIKKGILQTVKVVDELVKVMGRHKPENIVIEMARENQTTQKGQKNSRERMKRIEEGIKELGSQILKEHPVENTQLQNEKLYLYYLQNGRDMYVDQELDINRLSDYDVDHIVPQSFLKDDSIDNKVLTRSDKNRGKSDNVPSEEVVKKMKNYWRQLLNAKLITQRKFDNLTKAERGGLSELDKAGFIKRQLVETRQITKHVAQILDSRMNTKYDENDKLIREVKVITLKSKLVSDFRKDFQFYKVREINNYHHAHDAYLNAVVGTALIKKYPKLESEFVYGDYKVYDVRKMIAKSEQEIGKATAKYFFYSNIMNFFKTEITLANGEIRKRPLIETNGETGEIVWDKGRDFATVRKVLSMPQVNIVKKTEVQTGGFSKESILPKRNSDKLIARKKDWDPKKYGGFVSPTVAYSVLVVAKVEKGKSKKLKSVKELLGITIMERSSFEKNPIDFLEAKGYKEVKKDLIIKLPKYSLFELENGRKRMLASARELQKGNELALPSKYVNFLYLASHYEKLKGSPEDNEQKQLFVEQHKHYLDEIIEQISEFSKRVILADANLDKVLSAYNKHRDKPIREQAENIIHLFTLTNLGAPAAFKYFDTTIDRKQYRSTKEVLDATLIHQSITGLYETRIDLSQLGGDEGADKRTADGSEFESPKKKRKV

SEQ ID NO: 343 - protein, 1588 aa, synthetic construct
  REGION 1..1588: note = 03. monoABE8.1_bpNLS + Q154S polypeptide sequence
MSEVEFSHEYWMRHALTLAKRARDEREVPVGAVLVLNNRVIGEGWNRAIGLHDPTAHAEIMALRQGGLVMQNYRLIDATLYVTFEPCVMCAGAMIHSRIGRVVFGVRNAKTGAAGSLMDVLHYPGMNHRVEITEGILADECAALLCYFFRMPRSVFNAQKKAQSSTDSGGSSGGSSGSETPGTSESATPESSGGSSGGSDKKYSIGLAIGTNSVGWAVITDEYKVPSKKFKVLGNTDRHSIKKNLIGALLFDSGETAEATRLKRTARRRYTRRKNRICYLQEIFSNEMAKVDDSFFHRLEESFLVEEDKKHERHPIFGNIVDEVAYHEKYPTIYHLRKKLVDSTDKADLRLIYLALAHMIKFRGHFLIEGDLNPDNSDVDKLFIQLVQTYNQLFEENPINASGVDAKAILSARLSKSRRLENLIAQLPGEKKNGLFGNLIALSLGLTPNFKSNFDLAEDAKLQLSKDTYDDDLDNLLAQIGDQYADLFLAAKNLSDAILLSDILRVNTEITKAPLSASMIKRYDEHHQDLTLLKALVRQQLPEKYKEIFFDQSKNGYAGYIDGGASQEEFYKFIKPILEKMDGTEELLVKLNREDLLRKQRTFDNGSIPHQIHLGELHAILRRQEDFYPFLKDNREKIEKILTFRIPYYVGPLARGNSRFAWMTRKSEETITPWNFEEVVDKGASAQSFIERMTNFDKNLPNEKVLPKHSLLYEYFTVYNELTKVKYVTEGMRKPAFLSGEQKKAIVDLLFKTNRKVTVKQLKEDYFKKIECFDSVEISGVEDRFNASLGTYHDLLKIIKDKDFLDNEENEDILEDIVLTLTLFEDREMIEERLKTYAHLFDDKVMKQLKRRRYTGWGRLSRKLINGIRDKQSGKTILDFLKSDGFANRNFMQLIHDDSLTFKEDIQKAQVSGQGDSLHEHIANLAGSPAIKKGILQTVKVVDELVKVMGRHKPENIVIEMARENQTTQKGQKNSRERMKRIEEGIKELGSQILKEHPVENTQLQNEKLYLYYLQNGRDMYVDQELDINRLSDYDVDHIVPQSFLKDDSIDNKVLTRSDKNRGKSDNVPSEEVVKKMKNYWRQLLNAKLITQRKFDNLTKAERGGLSELDKAGFIKRQLVETRQITKHVAQILDSRMNTKYDENDKLIREVKVITLKSKLVSDFRKDFQFYKVREINNYHHAHDAYLNAVVGTALIKKYPKLESEFVYGDYKVYDVRKMIAKSEQEIGKATAKYFFYSNIMNFFKTEITLANGEIRKRPLIETNGETGEIVWDKGRDFATVRKVLSMPQVNIVKKTEVQTGGFSKESILPKRNSDKLIARKKDWDPKKYGGFVSPTVAYSVLVVAKVEKGKSKKLKSVKELLGITIMERSSFEKNPIDFLEAKGYKEVKKDLIIKLPKYSLFELENGRKRMLASARELQKGNELALPSKYVNFLYLASHYEKLKGSPEDNEQKQLFVEQHKHYLDEIIEQISEFSKRVILADANLDKVLSAYNKHRDKPIREQAENIIHLFTLTNLGAPAAFKYFDTTIDRKQYRSTKEVLDATLIHQSITGLYETRIDLSQLGGDEGADKRTADGSEFESPKKKRKV

SEQ ID NO: 344 - protein, 1588 aa, synthetic construct
  REGION 1..1588: note = 04. monoABE8.1_bpNLS + Y123H polypeptide sequence
MSEVEFSHEYWMRHALTLAKRARDEREVPVGAVLVLNNRVIGEGWNRAIGLHDPTAHAEIMALRQGGLVMQNYRLIDATLYVTFEPCVMCAGAMIHSRIGRVVFGVRNAKTGAAGSLMDVLHHPGMNHRVEITEGILADECAALLCYFFRMPRQVFNAQKKAQSSTDSGGSSGGSSGSETPGTSESATPESSGGSSGGSDKKYSIGLAIGTNSVGWAVITDEYKVPSKKFKVLGNTDRHSIKKNLIGALLFDSGETAEATRLKRTARRRYTRRKNRICYLQEIFSNEMAKVDDSFFHRLEESFLVEEDKKHERHPIFGNIVDEVAYHEKYPTIYHLRKKLVDSTDKADLRLIYLALAHMIKFRGHFLIEGDLNPDNSDVDKLFIQLVQTYNQLFEENPINASGVDAKAILSARLSKSRRLENLIAQLPGEKKNGLFGNLIALSLGLTPNFKSNFDLAEDAKLQLSKDTYDDDLDNLLAQIGDQYADLFLAAKNLSDAILLSDILRVNTEITKAPLSASMIKRYDEHHQDLTLLKALVRQQLPEKYKEIFFDQSKNGYAGYIDGGASQEEFYKFIKPILEKMDGTEELLVKLNREDLLRKQRTFDNGSIPHQIHLGELHAILRRQEDFYPFLKDNREKIEKILTFRIPYYVGPLARGNSRFAWMTRKSEETITPWNFEEVVDKGASAQSFIERMTNFDKNLPNEKVLPKHSLLYEYFTVYNELTKVKYVTEGMRKPAFLSGEQKKAIVDLLFKTNRKVTVKQLKEDYFKKIECFDSVEISGVEDRFNASLGTYHDLLKIIKDKDFLDNEENEDILEDIVLTLTLFEDREMIEERLKTYAHLFDDKVMKQLKRRRYTGWGRLSRKLINGIRDKQSGKTILDFLKSDGFANRNFMQLIHDDSLTFKEDIQKAQVSGQGDSLHEHIANLAGSPAIKKGILQTVKVVDELVKVMGRHKPENIVIEMARENQTTQKGQKNSRERMKRIEEGIKELGSQILKEHPVENTQLQNEKLYLYYLQNGRDMYVDQELDINRLSDYDVDHIVPQSFLKDDSIDNKVLTRSDKNRGKSDNVPSEEVVKKMKNYWRQLLNAKLITQRKFDNLTKAERGGLSELDKAGFIKRQLVETRQITKHVAQILDSRMNTKYDENDKLIREVKVITLKSKLVSDFRKDFQFYKVREINNYHHAHDAYLNAVVGTALIKKYPKLESEFVYGDYKVYDVRKMIAKSEQEIGKATAKYFFYSNIMNFFKTEITLANGEIRKRPLIETNGETGEIVWDKGRDFATVRKVLSMPQVNIVKKTEVQTGGFSKESILPKRNSDKLIARKKDWDPKKYGGFVSPTVAYSVLVVAKVEKGKSKKLKSVKELLGITIMERSSFEKNPIDFLEAKGYKEVKKDLIIKLPKYSLFELENGRKRMLASARELQKGNELALPSKYVNFLYLASHYEKLKGSPEDNEQKQLFVEQHKHYLDEIIEQISEFSKRVILADANLDKVLSAYNKHRDKPIREQAENIIHLFTLTNLGAPAAFKYFDTTIDRKQYRSTKEVLDATLIHQSITGLYETRIDLSQLGGDEGADKRTADGSEFESPKKKRKV

SEQ ID NO: 345 - protein, 1588 aa, synthetic construct
  REGION 1..1588: note = 05. monoABE8.1_bpNLS + V82S polypeptide sequence
MSEVEFSHEYWMRHALTLAKRARDEREVPVGAVLVLNNRVIGEGWNRAIGLHDPTAHAEIMALRQGGLVMQNYRLIDATLYSTFEPCVMCAGAMIHSRIGRVVFGVRNAKTGAAGSLMDVLHYPGMNHRVEITEGILADECAALLCYFFRMPRQVFNAQKKAQSSTDSGGSSGGSSGSETPGTSESATPESSGGSSGGSDKKYSIGLAIGTNSVGWAVITDEYKVPSKKFKVLGNTDRHSIKKNLIGALLFDSGETAEATRLKRTARRRYTRRKNRICYLQEIFSNEMAKVDDSFFHRLEESFLVEEDKKHERHPIFGNIVDEVAYHEKYPTIYHLRKKLVDSTDKADLRLIYLALAHMIKFRGHFLIEGDLNPDNSDVDKLFIQLVQTYNQLFEENPINASGVDAKAILSARLSKSRRLENLIAQLPGEKKNGLFGNLIALSLGLTPNFKSNFDLAEDAKLQLSKDTYDDDLDNLLAQIGDQYADLFLAAKNLSDAILLSDILRVNTEITKAPLSASMIKRYDEHHQDLTLLKALVRQQLPEKYKEIFFDQSKNGYAGYIDGGASQEEFYKFIKPILEKMDGTEELLVKLNREDLLRKQRTFDNGSIPHQIHLGELHAILRRQEDFYPFLKDNREKIEKILTFRIPYYVGPLARGNSRFAWMTRKSEETITPWNFEEVVDKGASAQSFIERMTNFDKNLPNEKVLPKHSLLYEYFTVYNELTKVKYVTEGMRKPAFLSGEQKKAIVDLLFKTNRKVTVKQLKEDYFKKIECFDSVEISGVEDRFNASLGTYHDLLKIIKDKDFLDNEENEDILEDIVLTLTLFEDREMIEERLKTYAHLFDDKVMKQLKRRRYTGWGRLSRKLINGIRDKQSGKTILDFLKSDGFANRNFMQLIHDDSLTFKEDIQKAQVSGQGDSLHEHIANLAGSPAIKKGILQTVKVVDELVKVMGRHKPENIVIEMARENQTTQKGQKNSRERMKRIEEGIKELGSQILKEHPVENTQLQNEKLYLYYLQNGRDMYVDQELDINRLSDYDVDHIVPQSFLKDDSIDNKVLTRSDKNRGKSDNVPSEEVVKKMKNYWRQLLNAKLITQRKFDNLTKAERGGLSELDKAGFIKRQLVETRQITKHVAQILDSRMNTKYDENDKLIREVKVITLKSKLVSDFRKDFQFYKVREINNYHHAHDAYLNAVVGTALIKKYPKLESEFVYGDYKVYDVRKMIAKSEQEIGKATAKYFFYSNIMNFFKTEITLANGEIRKRPLIETNGETGEIVWDKGRDFATVRKVLSMPQVNIVKKTEVQTGGFSKESILPKRNSDKLIARKKDWDPKKYGGFVSPTVAYSVLVVAKVEKGKSKKLKSVKELLGITIMERSSFEKNPIDFLEAKGYKEVKKDLIIKLPKYSLFELENGRKRMLASARELQKGNELALPSKYVNFLYLASHYEKLKGSPEDNEQKQLFVEQHKHYLDEIIEQISEFSKRVILADANLDKVLSAYNKHRDKPIREQAENIIHLFTLTNLGAPAAFKYFDTTIDRKQYRSTKEVLDATLIHQSITGLYETRIDLSQLGGDEGADKRTADGSEFESPKKKRKV

SEQ ID NO: 346 - protein, 1588 aa, synthetic construct
  REGION 1..1588: note = 06. monoABE8.1_bpNLS + T166R polypeptide sequence
MSEVEFSHEYWMRHALTLAKRARDEREVPVGAVLVLNNRVIGEGWNRAIGLHDPTAHAEIMALRQGGLVMQNYRLIDATLYVTFEPCVMCAGAMIHSRIGRVVFGVRNAKTGAAGSLMDVLHYPGMNHRVEITEGILADECAALLCYFFRMPRQVFNAQKKAQSSRDSGGSSGGSSGSETPGTSESATPESSGGSSGGSDKKYSIGLAIGTNSVGWAVITDEYKVPSKKFKVLGNTDRHSIKKNLIGALLFDSGETAEATRLKRTARRRYTRRKNRICYLQEIFSNEMAKVDDSFFHRLEESFLVEEDKKHERHPIFGNIVDEVAYHEKYPTIYHLRKKLVDSTDKADLRLIYLALAHMIKFRGHFLIEGDLNPDNSDVDKLFIQLVQTYNQLFEENPINASGVDAKAILSARLSKSRRLENLIAQLPGEKKNGLFGNLIALSLGLTPNFKSNFDLAEDAKLQLSKDTYDDDLDNLLAQIGDQYADLFLAAKNLSDAILLSDILRVNTEITKAPLSASMIKRYDEHHQDLTLLKALVRQQLPEKYKEIFFDQSKNGYAGYIDGGASQEEFYKFIKPILEKMDGTEELLVKLNREDLLRKQRTFDNGSIPHQIHLGELHAILRRQEDFYPFLKDNREKIEKILTFRIPYYVGPLARGNSRFAWMTRKSEETITPWNFEEVVDKGASAQSFIERMTNFDKNLPNEKVLPKHSLLYEYFTVYNELTKVKYVTEGMRKPAFLSGEQKKAIVDLLFKTNRKVTVKQLKEDYFKKIECFDSVEISGVEDRFNASLGTYHDLLKIIKDKDFLDNEENEDILEDIVLTLTLFEDREMIEERLKTYAHLFDDKVMKQLKRRRYTGWGRLSRKLINGIRDKQSGKTILDFLKSDGFANRNFMQLIHDDSLTFKEDIQKAQVSGQGDSLHEHIANLAGSPAIKKGILQTVKVVDELVKVMGRHKPENIVIEMARENQTTQKGQKNSRERMKRIEEGIKELGSQILKEHPVENTQLQNEKLYLYYLQNGRDMYVDQELDINRLSDYDVDHIVPQSFLKDDSIDNKVLTRSDKNRGKSDNVPSEEVVKKMKNYWRQLLNAKLITQRKFDNLTKAERGGLSELDKAGFIKRQLVETRQITKHVAQILDSRMNTKYDENDKLIREVKVITLKSKLVSDFRKDFQFYKVREINNYHHAHDAYLNAVVGTALIKKYPKLESEFVYGDYKVYDVRKMIAKSEQEIGKATAKYFFYSNIMNFFKTEITLANGEIRKRPLIETNGETGEIVWDKGRDFATVRKVLSMPQVNIVKKTEVQTGGFSKESILPKRNSDKLIARKKDWDPKKYGGFVSPTVAYSVLVVAKVEKGKSKKLKSVKELLGITIMERSSFEKNPIDFLEAKGYKEVKKDLIIKLPKYSLFELENGRKRMLASARELQKGNELALPSKYVNFLYLASHYEKLKGSPEDNEQKQLFVEQHKHYLDEIIEQISEFSKRVILADANLDKVLSAYNKHRDKPIREQAENIIHLFTLTNLGAPAAFKYFDTTIDRKQYRSTKEVLDATLIHQSITGLYETRIDLSQLGGDEGADKRTADGSEFESPKKKRKV

SEQ ID NO: 347 - protein, 1588 aa, synthetic construct
  REGION 1..1588: note = 07. monoABE8.1_bpNLS + Q154R polypeptide sequence
MSEVEFSHEYWMRHALTLAKRARDEREVPVGAVLVLNNRVIGEGWNRAIGLHDPTAHAEIMALRQGGLVMQNYRLIDATLYVTFEPCVMCAGAMIHSRIGRVVFGVRNAKTGAAGSLMDVLHYPGMNHRVEITEGILADECAALLCYFFRMPRRVFNAQKKAQSSTDSGGSSGGSSGSETPGTSESATPESSGGSSGGSDKKYSIGLAIGTNSVGWAVITDEYKVPSKKFKVLGNTDRHSIKKNLIGALLFDSGETAEATRLKRTARRRYTRRKNRICYLQEIFSNEMAKVDDSFFHRLEESFLVEEDKKHERHPIFGNIVDEVAYHEKYPTIYHLRKKLVDSTDKADLRLIYLALAHMIKFRGHFLIEGDLNPDNSDVDKLFIQLVQTYNQLFEENPINASGVDAKAILSARLSKSRRLENLIAQLPGEKKNGLFGNLIALSLGLTPNFKSNFDLAEDAKLQLSKDTYDDDLDNLLAQIGDQYADLFLAAKNLSDAILLSDILRVNTEITKAPLSASMIKRYDEHHQDLTLLKALVRQQLPEKYKEIFFDQSKNGYAGYIDGGASQEEFYKFIKPILEKMDGTEELLVKLNREDLLRKQRTFDNGSIPHQIHLGELHAILRRQEDFYPFLKDNREKIEKILTFRIPYYVGPLARGNSRFAWMTRKSEETITPWNFEEVVDKGASAQSFIERMTNFDKNLPNEKVLPKHSLLYEYFTVYNELTKVKYVTEGMRKPAFLSGEQKKAIVDLLFKTNRKVTVKQLKEDYFKKIECFDSVEISGVEDRFNASLGTYHDLLKIIKDKDFLDNEENEDILEDIVLTLTLFEDREMIEERLKTYAHLFDDKVMKQLKRRRYTGWGRLSRKLINGIRDKQSGKTILDFLKSDGFANRNFMQLIHDDSLTFKEDIQKAQVSGQGDSLHEHIANLAGSPAIKKGILQTVKVVDELVKVMGRHKPENIVIEMARENQTTQKGQKNSRERMKRIEEGIKELGSQILKEHPVENTQLQNEKLYLYYLQNGRDMYVDQELDINRLSDYDVDHIVPQSFLKDDSIDNKVLTRSDKNRGKSDNVPSEEVVKKMKNYWRQLLNAKLITQRKFDNLTKAERGGLSELDKAGFIKRQLVETRQITKHVAQILDSRMNTKYDENDKLIREVKVITLKSKLVSDFRKDFQFYKVREINNYHHAHDAYLNAVVGTALIKKYPKLESEFVYGDYKVYDVRKMIAKSEQEIGKATAKYFFYSNIMNFFKTEITLANGEIRKRPLIETNGETGEIVWDKGRDFATVRKVLSMPQVNIVKKTEVQTGGFSKESILPKRNSDKLIARKKDWDPKKYGGFVSPTVAYSVLVVAKVEKGKSKKLKSVKELLGITIMERSSFEKNPIDFLEAKGYKEVKKDLIIKLPKYSLFELENGRKRMLASARELQKGNELALPSKYVNFLYLASHYEKLKGSPEDNEQKQLFVEQHKHYLDEIIEQISEFSKRVILADANLDKVLSAYNKHRDKPIREQAENIIHLFTLTNLGAPAAFKYFDTTIDRKQYRSTKEVLDATLIHQSITGLYETRIDLSQLGGDEGADKRTADGSEFESPKKKRKV

SEQ ID NO: 348 - protein, 1588 aa, synthetic construct
  REGION 1..1588: note = 08. monoABE8.1_bpNLS +Y147R_Q154R_Y123H polypeptide sequence
MSEVEFSHEYWMRHALTLAKRARDEREVPVGAVLVLNNRVIGEGWNRAIGLHDPTAHAEIMALRQGGLVMQNYRLIDATLYVTFEPCVMCAGAMIHSRIGRVVFGVRNAKTGAAGSLMDVLHHPGMNHRVEITEGILADECAALLCRFFRMPRRVFNAQKKAQSSTDSGGSSGGSSGSETPGTSESATPESSGGSSGGSDKKYSIGLAIGTNSVGWAVITDEYKVPSKKFKVLGNTDRHSIKKNLIGALLFDSGETAEATRLKRTARRRYTRRKNRICYLQEIFSNEMAKVDDSFFHRLEESFLVEEDKKHERHPIFGNIVDEVAYHEKYPTIYHLRKKLVDSTDKADLRLIYLALAHMIKFRGHFLIEGDLNPDNSDVDKLFIQLVQTYNQLFEENPINASGVDAKAILSARLSKSRRLENLIAQLPGEKKNGLFGNLIALSLGLTPNFKSNFDLAEDAKLQLSKDTYDDDLDNLLAQIGDQYADLFLAAKNLSDAILLSDILRVNTEITKAPLSASMIKRYDEHHQDLTLLKALVRQQLPEKYKEIFFDQSKNGYAGYIDGGASQEEFYKFIKPILEKMDGTEELLVKLNREDLLRKQRTFDNGSIPHQIHLGELHAILRRQEDFYPFLKDNREKIEKILTFRIPYYVGPLARGNSRFAWMTRKSEETITPWNFEEVVDKGASAQSFIERMTNFDKNLPNEKVLPKHSLLYEYFTVYNELTKVKYVTEGMRKPAFLSGEQKKAIVDLLFKTNRKVTVKQLKEDYFKKIECFDSVEISGVEDRFNASLGTYHDLLKIIKDKDFLDNEENEDILEDIVLTLTLFEDREMIEERLKTYAHLFDDKVMKQLKRRRYTGWGRLSRKLINGIRDKQSGKTILDFLKSDGFANRNFMQLIHDDSLTFKEDIQKAQVSGQGDSLHEHIANLAGSPAIKKGILQTVKVVDELVKVMGRHKPENIVIEMARENQTTQKGQKNSRERMKRIEEGIKELGSQILKEHPVENTQLQNEKLYLYYLQNGRDMYVDQELDINRLSDYDVDHIVPQSFLKDDSIDNKVLTRSDKNRGKSDNVPSEEVVKKMKNYWRQLLNAKLITQRKFDNLTKAERGGLSELDKAGFIKRQLVETRQITKHVAQILDSRMNTKYDENDKLIREVKVITLKSKLVSDFRKDFQFYKVREINNYHHAHDAYLNAVVGTALIKKYPKLESEFVYGDYKVYDVRKMIAKSEQEIGKATAKYFFYSNIMNFFKTEITLANGEIRKRPLIETNGETGEIVWDKGRDFATVRKVLSMPQVNIVKKTEVQTGGFSKESILPKRNSDKLIARKKDWDPKKYGGFVSPTVAYSVLVVAKVEKGKSKKLKSVKELLGITIMERSSFEKNPIDFLEAKGYKEVKKDLIIKLPKYSLFELENGRKRMLASARELQKGNELALPSKYVNFLYLASHYEKLKGSPEDNEQKQLFVEQHKHYLDEIIEQISEFSKRVILADANLDKVLSAYNKHRDKPIREQAENIIHLFTLTNLGAPAAFKYFDTTIDRKQYRSTKEVLDATLIHQSITGLYETRIDLSQLGGDEGADKRTADGSEFESPKKKRKV

SEQ ID NO: 349 - protein, 1588 aa, synthetic construct
  REGION 1..1588: note = 09. monoABE8.1_bpNLS +Y147R_Q154R_I76Y polypeptide sequence
MSEVEFSHEYWMRHALTLAKRARDEREVPVGAVLVLNNRVIGEGWNRAIGLHDPTAHAEIMALRQGGLVMQNYRLYDATLYVTFEPCVMCAGAMIHSRIGRVVFGVRNAKTGAAGSLMDVLHYPGMNHRVEITEGILADECAALLCRFFRMPRRVFNAQKKAQSSTDSGGSSGGSSGSETPGTSESATPESSGGSSGGSDKKYSIGLAIGTNSVGWAVITDEYKVPSKKFKVLGNTDRHSIKKNLIGALLFDSGETAEATRLKRTARRRYTRRKNRICYLQEIFSNEMAKVDDSFFHRLEESFLVEEDKKHERHPIFGNIVDEVAYHEKYPTIYHLRKKLVDSTDKADLRLIYLALAHMIKFRGHFLIEGDLNPDNSDVDKLFIQLVQTYNQLFEENPINASGVDAKAILSARLSKSRRLENLIAQLPGEKKNGLFGNLIALSLGLTPNFKSNFDLAEDAKLQLSKDTYDDDLDNLLAQIGDQYADLFLAAKNLSDAILLSDILRVNTEITKAPLSASMIKRYDEHHQDLTLLKALVRQQLPEKYKEIFFDQSKNGYAGYIDGGASQEEFYKFIKPILEKMDGTEELLVKLNREDLLRKQRTFDNGSIPHQIHLGELHAILRRQEDFYPFLKDNREKIEKILTFRIPYYVGPLARGNSRFAWMTRKSEETITPWNFEEVVDKGASAQSFIERMTNFDKNLPNEKVLPKHSLLYEYFTVYNELTKVKYVTEGMRKPAFLSGEQKKAIVDLLFKTNRKVTVKQLKEDYFKKIECFDSVEISGVEDRFNASLGTYHDLLKIIKDKDFLDNEENEDILEDIVLTLTLFEDREMIEERLKTYAHLFDDKVMKQLKRRRYTGWGRLSRKLINGIRDKQSGKTILDFLKSDGFANRNFMQLIHDDSLTFKEDIQKAQVSGQGDSLHEHIANLAGSPAIKKGILQTVKVVDELVKVMGRHKPENIVIEMARENQTTQKGQKNSRERMKRIEEGIKELGSQILKEHPVENTQLQNEKLYLYYLQNGRDMYVDQELDINRLSDYDVDHIVPQSFLKDDSIDNKVLTRSDKNRGKSDNVPSEEVVKKMKNYWRQLLNAKLITQRKFDNLTKAERGGLSELDKAGFIKRQLVETRQITKHVAQILDSRMNTKYDENDKLIREVKVITLKSKLVSDFRKDFQFYKVREINNYHHAHDAYLNAVVGTALIKKYPKLESEFVYGDYKVYDVRKMIAKSEQEIGKATAKYFFYSNIMNFFKTEITLANGEIRKRPLIETNGETGEIVWDKGRDFATVRKVLSMPQVNIVKKTEVQTGGFSKESILPKRNSDKLIARKKDWDPKKYGGFVSPTVAYSVLVVAKVEKGKSKKLKSVKELLGITIMERSSFEKNPIDFLEAKGYKEVKKDLIIKLPKYSLFELENGRKRMLASARELQKGNELALPSKYVNFLYLASHYEKLKGSPEDNEQKQLFVEQHKHYLDEIIEQISEFSKRVILADANLDKVLSAYNKHRDKPIREQAENIIHLFTLTNLGAPAAFKYFDTTIDRKQYRSTKEVLDATLIHQSITGLYETRIDLSQLGGDEGADKRTADGSEFESPKKKRKV

SEQ ID NO: 350 - protein, 1588 aa, synthetic construct
  REGION 1..1588: note = 10. monoABE8.1_bpNLS +Y147R_Q154R_T166R polypeptide sequence
MSEVEFSHEYWMRHALTLAKRARDEREVPVGAVLVLNNRVIGEGWNRAIGLHDPTAHAEIMALRQGGLVMQNYRLIDATLYVTFEPCVMCAGAMIHSRIGRVVFGVRNAKTGAAGSLMDVLHYPGMNHRVEITEGILADECAALLCRFFRMPRRVFNAQKKAQSSRDSGGSSGGSSGSETPGTSESATPESSGGSSGGSDKKYSIGLAIGTNSVGWAVITDEYKVPSKKFKVLGNTDRHSIKKNLIGALLFDSGETAEATRLKRTARRRYTRRKNRICYLQEIFSNEMAKVDDSFFHRLEESFLVEEDKKHERHPIFGNIVDEVAYHEKYPTIYHLRKKLVDSTDKADLRLIYLALAHMIKFRGHFLIEGDLNPDNSDVDKLFIQLVQTYNQLFEENPINASGVDAKAILSARLSKSRRLENLIAQLPGEKKNGLFGNLIALSLGLTPNFKSNFDLAEDAKLQLSKDTYDDDLDNLLAQIGDQYADLFLAAKNLSDAILLSDILRVNTEITKAPLSASMIKRYDEHHQDLTLLKALVRQQLPEKYKEIFFDQSKNGYAGYIDGGASQEEFYKFIKPILEKMDGTEELLVKLNREDLLRKQRTFDNGSIPHQIHLGELHAILRRQEDFYPFLKDNREKIEKILTFRIPYYVGPLARGNSRFAWMTRKSEETITPWNFEEVVDKGASAQSFIERMTNFDKNLPNEKVLPKHSLLYEYFTVYNELTKVKYVTEGMRKPAFLSGEQKKAIVDLLFKTNRKVTVKQLKEDYFKKIECFDSVEISGVEDRFNASLGTYHDLLKIIKDKDFLDNEENEDILEDIVLTLTLFEDREMIEERLKTYAHLFDDKVMKQLKRRRYTGWGRLSRKLINGIRDKQSGKTILDFLKSDGFANRNFMQLIHDDSLTFKEDIQKAQVSGQGDSLHEHIANLAGSPAIKKGILQTVKVVDELVKVMGRHKPENIVIEMARENQTTQKGQKNSRERMKRIEEGIKELGSQILKEHPVENTQLQNEKLYLYYLQNGRDMYVDQELDINRLSDYDVDHIVPQSFLKDDSIDNKVLTRSDKNRGKSDNVPSEEVVKKMKNYWRQLLNAKLITQRKFDNLTKAERGGLSELDKAGFIKRQLVETRQITKHVAQILDSRMNTKYDENDKLIREVKVITLKSKLVSDFRKDFQFYKVREINNYHHAHDAYLNAVVGTALIKKYPKLESEFVYGDYKVYDVRKMIAKSEQEIGKATAKYFFYSNIMNFFKTEITLANGEIRKRPLIETNGETGEIVWDKGRDFATVRKVLSMPQVNIVKKTEVQTGGFSKESILPKRNSDKLIARKKDWDPKKYGGFVSPTVAYSVLVVAKVEKGKSKKLKSVKELLGITIMERSSFEKNPIDFLEAKGYKEVKKDLIIKLPKYSLFELENGRKRMLASARELQKGNELALPSKYVNFLYLASHYEKLKGSPEDNEQKQLFVEQHKHYLDEIIEQISEFSKRVILADANLDKVLSAYNKHRDKPIREQAENIIHLFTLTNLGAPAAFKYFDTTIDRKQYRSTKEVLDATLIHQSITGLYETRIDLSQLGGDEGADKRTADGSEFESPKKKRKV

SEQ ID NO: 351 - protein, 1588 aa, synthetic construct
  REGION 1..1588: note = 11. monoABE8.1_bpNLS +Y147T_Q154R polypeptide sequence
MSEVEFSHEYWMRHALTLAKRARDEREVPVGAVLVLNNRVIGEGWNRAIGLHDPTAHAEIMALRQGGLVMQNYRLIDATLYVTFEPCVMCAGAMIHSRIGRVVFGVRNAKTGAAGSLMDVLHYPGMNHRVEITEGILADECAALLCTFFRMPRRVFNAQKKAQSSTDSGGSSGGSSGSETPGTSESATPESSGGSSGGSDKKYSIGLAIGTNSVGWAVITDEYKVPSKKFKVLGNTDRHSIKKNLIGALLFDSGETAEATRLKRTARRRYTRRKNRICYLQEIFSNEMAKVDDSFFHRLEESFLVEEDKKHERHPIFGNIVDEVAYHEKYPTIYHLRKKLVDSTDKADLRLIYLALAHMIKFRGHFLIEGDLNPDNSDVDKLFIQLVQTYNQLFEENPINASGVDAKAILSARLSKSRRLENLIAQLPGEKKNGLFGNLIALSLGLTPNFKSNFDLAEDAKLQLSKDTYDDDLDNLLAQIGDQYADLFLAAKNLSDAILLSDILRVNTEITKAPLSASMIKRYDEHHQDLTLLKALVRQQLPEKYKEIFFDQSKNGYAGYIDGGASQEEFYKFIKPILEKMDGTEELLVKLNREDLLRKQRTFDNGSIPHQIHLGELHAILRRQEDFYPFLKDNREKIEKILTFRIPYYVGPLARGNSRFAWMTRKSEETITPWNFEEVVDKGASAQSFIERMTNFDKNLPNEKVLPKHSLLYEYFTVYNELTKVKYVTEGMRKPAFLSGEQKKAIVDLLFKTNRKVTVKQLKEDYFKKIECFDSVEISGVEDRFNASLGTYHDLLKIIKDKDFLDNEENEDILEDIVLTLTLFEDREMIEERLKTYAHLFDDKVMKQLKRRRYTGWGRLSRKLINGIRDKQSGKTILDFLKSDGFANRNFMQLIHDDSLTFKEDIQKAQVSGQGDSLHEHIANLAGSPAIKKGILQTVKVVDELVKVMGRHKPENIVIEMARENQTTQKGQKNSRERMKRIEEGIKELGSQILKEHPVENTQLQNEKLYLYYLQNGRDMYVDQELDINRLSDYDVDHIVPQSFLKDDSIDNKVLTRSDKNRGKSDNVPSEEVVKKMKNYWRQLLNAKLITQRKFDNLTKAERGGLSELDKAGFIKRQLVETRQITKHVAQILDSRMNTKYDENDKLIREVKVITLKSKLVSDFRKDFQFYKVREINNYHHAHDAYLNAVVGTALIKKYPKLESEFVYGDYKVYDVRKMIAKSEQEIGKATAKYFFYSNIMNFFKTEITLANGEIRKRPLIETNGETGEIVWDKGRDFATVRKVLSMPQVNIVKKTEVQTGGFSKESILPKRNSDKLIARKKDWDPKKYGGFVSPTVAYSVLVVAKVEKGKSKKLKSVKELLGITIMERSSFEKNPIDFLEAKGYKEVKKDLIIKLPKYSLFELENGRKRMLASARELQKGNELALPSKYVNFLYLASHYEKLKGSPEDNEQKQLFVEQHKHYLDEIIEQISEFSKRVILADANLDKVLSAYNKHRDKPIREQAENIIHLFTLTNLGAPAAFKYFDTTIDRKQYRSTKEVLDATLIHQSITGLYETRIDLSQLGGDEGADKRTADGSEFESPKKKRKV

SEQ ID NO: 352 - protein, 1588 aa, synthetic construct
  REGION 1..1588: note = 12. monoABE8.1_bpNLS +Y147T_Q154S polypeptide sequence
MSEVEFSHEYWMRHALTLAKRARDEREVPVGAVLVLNNRVIGEGWNRAIGLHDPTAHAEIMALRQGGLVMQNYRLIDATLYVTFEPCVMCAGAMIHSRIGRVVFGVRNAKTGAAGSLMDVLHYPGMNHRVEITEGILADECAALLCTFFRMPRSVFNAQKKAQSSTDSGGSSGGSSGSETPGTSESATPESSGGSSGGSDKKYSIGLAIGTNSVGWAVITDEYKVPSKKFKVLGNTDRHSIKKNLIGALLFDSGETAEATRLKRTARRRYTRRKNRICYLQEIFSNEMAKVDDSFFHRLEESFLVEEDKKHERHPIFGNIVDEVAYHEKYPTIYHLRKKLVDSTDKADLRLIYLALAHMIKFRGHFLIEGDLNPDNSDVDKLFIQLVQTYNQLFEENPINASGVDAKAILSARLSKSRRLENLIAQLPGEKKNGLFGNLIALSLGLTPNFKSNFDLAEDAKLQLSKDTYDDDLDNLLAQIGDQYADLFLAAKNLSDAILLSDILRVNTEITKAPLSASMIKRYDEHHQDLTLLKALVRQQLPEKYKEIFFDQSKNGYAGYIDGGASQEEFYKFIKPILEKMDGTEELLVKLNREDLLRKQRTFDNGSIPHQIHLGELHAILRRQEDFYPFLKDNREKIEKILTFRIPYYVGPLARGNSRFAWMTRKSEETITPWNFEEVVDKGASAQSFIERMTNFDKNLPNEKVLPKHSLLYEYFTVYNELTKVKYVTEGMRKPAFLSGEQKKAIVDLLFKTNRKVTVKQLKEDYFKKIECFDSVEISGVEDRFNASLGTYHDLLKIIKDKDFLDNEENEDILEDIVLTLTLFEDREMIEERLKTYAHLFDDKVMKQLKRRRYTGWGRLSRKLINGIRDKQSGKTILDFLKSDGFANRNFMQLIHDDSLTFKEDIQKAQVSGQGDSLHEHIANLAGSPAIKKGILQTVKVVDELVKVMGRHKPENIVIEMARENQTTQKGQKNSRERMKRIEEGIKELGSQILKEHPVENTQLQNEKLYLYYLQNGRDMYVDQELDINRLSDYDVDHIVPQSFLKDDSIDNKVLTRSDKNRGKSDNVPSEEVVKKMKNYWRQLLNAKLITQRKFDNLTKAERGGLSELDKAGFIKRQLVETRQITKHVAQILDSRMNTKYDENDKLIREVKVITLKSKLVSDFRKDFQFYKVREINNYHHAHDAYLNAVVGTALIKKYPKLESEFVYGDYKVYDVRKMIAKSEQEIGKATAKYFFYSNIMNFFKTEITLANGEIRKRPLIETNGETGEIVWDKGRDFATVRKVLSMPQVNIVKKTEVQTGGFSKESILPKRNSDKLIARKKDWDPKKYGGFVSPTVAYSVLVVAKVEKGKSKKLKSVKELLGITIMERSSFEKNPIDFLEAKGYKEVKKDLIIKLPKYSLFELENGRKRMLASARELQKGNELALPSKYVNFLYLASHYEKLKGSPEDNEQKQLFVEQHKHYLDEIIEQISEFSKRVILADANLDKVLSAYNKHRDKPIREQAENIIHLFTLTNLGAPAAFKYFDTTIDRKQYRSTKEVLDATLIHQSITGLYETRIDLSQLGGDEGADKRTADGSEFESPKKKRKV

SEQ ID NO: 353 - protein, 1588 aa, synthetic construct
  REGION 1..1588: note = 13. monoABE8.1_bpNLS +H123Y123H_Y147R_Q154R_I76Y polypeptide sequence
MSEVEFSHEYWMRHALTLAKRARDEREVPVGAVLVLNNRVIGEGWNRAIGLHDPTAHAEIMALRQGGLVMQNYRLYDATLYVTFEPCVMCAGAMIHSRIGRVVFGVRNAKTGAAGSLMDVLHHPGMNHRVEITEGILADECAALLCRFFRMPRRVFNAQKKAQSSTDSGGSSGGSSGSETPGTSESATPESSGGSSGGSDKKYSIGLAIGTNSVGWAVITDEYKVPSKKFKVLGNTDRHSIKKNLIGALLFDSGETAEATRLKRTARRRYTRRKNRICYLQEIFSNEMAKVDDSFFHRLEESFLVEEDKKHERHPIFGNIVDEVAYHEKYPTIYHLRKKLVDSTDKADLRLIYLALAHMIKFRGHFLIEGDLNPDNSDVDKLFIQLVQTYNQLFEENPINASGVDAKAILSARLSKSRRLENLIAQLPGEKKNGLFGNLIALSLGLTPNFKSNFDLAEDAKLQLSKDTYDDDLDNLLAQIGDQYADLFLAAKNLSDAILLSDILRVNTEITKAPLSASMIKRYDEHHQDLTLLKALVRQQLPEKYKEIFFDQSKNGYAGYIDGGASQEEFYKFIKPILEKMDGTEELLVKLNREDLLRKQRTFDNGSIPHQIHLGELHAILRRQEDFYPFLKDNREKIEKILTFRIPYYVGPLARGNSRFAWMTRKSEETITPWNFEEVVDKGASAQSFIERMTNFDKNLPNEKVLPKHSLLYEYFTVYNELTKVKYVTEGMRKPAFLSGEQKKAIVDLLFKTNRKVTVKQLKEDYFKKIECFDSVEISGVEDRFNASLGTYHDLLKIIKDKDFLDNEENEDILEDIVLTLTLFEDREMIEERLKTYAHLFDDKVMKQLKRRRYTGWGRLSRKLINGIRDKQSGKTILDFLKSDGFANRNFMQLIHDDSLTFKEDIQKAQVSGQGDSLHEHIANLAGSPAIKKGILQTVKVVDELVKVMGRHKPENIVIEMARENQTTQKGQKNSRERMKRIEEGIKELGSQILKEHPVENTQLQNEKLYLYYLQNGRDMYVDQELDINRLSDYDVDHIVPQSFLKDDSIDNKVLTRSDKNRGKSDNVPSEEVVKKMKNYWRQLLNAKLITQRKFDNLTKAERGGLSELDKAGFIKRQLVETRQITKHVAQILDSRMNTKYDENDKLIREVKVITLKSKLVSDFRKDFQFYKVREINNYHHAHDAYLNAVVGTALIKKYPKLESEFVYGDYKVYDVRKMIAKSEQEIGKATAKYFFYSNIMNFFKTEITLANGEIRKRPLIETNGETGEIVWDKGRDFATVRKVLSMPQVNIVKKTEVQTGGFSKESILPKRNSDKLIARKKDWDPKKYGGFVSPTVAYSVLVVAKVEKGKSKKLKSVKELLGITIMERSSFEKNPIDFLEAKGYKEVKKDLIIKLPKYSLFELENGRKRMLASARELQKGNELALPSKYVNFLYLASHYEKLKGSPEDNEQKQLFVEQHKHYLDEIIEQISEFSKRVILADANLDKVLSAYNKHRDKPIREQAENIIHLFTLTNLGAPAAFKYFDTTIDRKQYRSTKEVLDATLIHQSITGLYETRIDLSQLGGDEGADKRTADGSEFESPKKKRKV

SEQ ID NO: 354 - protein, 1588 aa, synthetic construct
  REGION 1..1588: note = 14. monoABE8.1_bpNLS + V82S +Q154R polypeptide sequence
MSEVEFSHEYWMRHALTLAKRARDEREVPVGAVLVLNNRVIGEGWNRAIGLHDPTAHAEIMALRQGGLVMQNYRLIDATLYSTFEPCVMCAGAMIHSRIGRVVFGVRNAKTGAAGSLMDVLHYPGMNHRVEITEGILADECAALLCYFFRMPRRVFNAQKKAQSSTDSGGSSGGSSGSETPGTSESATPESSGGSSGGSDKKYSIGLAIGTNSVGWAVITDEYKVPSKKFKVLGNTDRHSIKKNLIGALLFDSGETAEATRLKRTARRRYTRRKNRICYLQEIFSNEMAKVDDSFFHRLEESFLVEEDKKHERHPIFGNIVDEVAYHEKYPTIYHLRKKLVDSTDKADLRLIYLALAHMIKFRGHFLIEGDLNPDNSDVDKLFIQLVQTYNQLFEENPINASGVDAKAILSARLSKSRRLENLIAQLPGEKKNGLFGNLIALSLGLTPNFKSNFDLAEDAKLQLSKDTYDDDLDNLLAQIGDQYADLFLAAKNLSDAILLSDILRVNTEITKAPLSASMIKRYDEHHQDLTLLKALVRQQLPEKYKEIFFDQSKNGYAGYIDGGASQEEFYKFIKPILEKMDGTEELLVKLNREDLLRKQRTFDNGSIPHQIHLGELHAILRRQEDFYPFLKDNREKIEKILTFRIPYYVGPLARGNSRFAWMTRKSEETITPWNFEEVVDKGASAQSFIERMTNFDKNLPNEKVLPKHSLLYEYFTVYNELTKVKYVTEGMRKPAFLSGEQKKAIVDLLFKTNRKVTVKQLKEDYFKKIECFDSVEISGVEDRFNASLGTYHDLLKIIKDKDFLDNEENEDILEDIVLTLTLFEDREMIEERLKTYAHLFDDKVMKQLKRRRYTGWGRLSRKLINGIRDKQSGKTILDFLKSDGFANRNFMQLIHDDSLTFKEDIQKAQVSGQGDSLHEHIANLAGSPAIKKGILQTVKVVDELVKVMGRHKPENIVIEMARENQTTQKGQKNSRERMKRIEEGIKELGSQILKEHPVENTQLQNEKLYLYYLQNGRDMYVDQELDINRLSDYDVDHIVPQSFLKDDSIDNKVLTRSDKNRGKSDNVPSEEVVKKMKNYWRQLLNAKLITQRKFDNLTKAERGGLSELDKAGFIKRQLVETRQITKHVAQILDSRMNTKYDENDKLIREVKVITLKSKLVSDFRKDFQFYKVREINNYHHAHDAYLNAVVGTALIKKYPKLESEFVYGDYKVYDVRKMIAKSEQEIGKATAKYFFYSNIMNFFKTEITLANGEIRKRPLIETNGETGEIVWDKGRDFATVRKVLSMPQVNIVKKTEVQTGGFSKESILPKRNSDKLIARKKDWDPKKYGGFVSPTVAYSVLVVAKVEKGKSKKLKSVKELLGITIMERSSFEKNPIDFLEAKGYKEVKKDLIIKLPKYSLFELENGRKRMLASARELQKGNELALPSKYVNFLYLASHYEKLKGSPEDNEQKQLFVEQHKHYLDEIIEQISEFSKRVILADANLDKVLSAYNKHRDKPIREQAENIIHLFTLTNLGAPAAFKYFDTTIDRKQYRSTKEVLDATLIHQSITGLYETRIDLSQLGGDEGADKRTADGSEFESPKKKRKV

SEQ ID NO: 355 - protein, 4 aa, synthetic construct
  REGION 1..4: note = synthetic peptide sequence
SGGS

SEQ ID NO: 356 - protein, 24 aa, synthetic construct
  REGION 1..24: note = synthetic peptide sequence
SGGSSGSETPGTSESATPESSGGS

SEQ ID NO: 357 - protein, 32 aa, synthetic construct
  REGION 1..32: note = synthetic polypeptide sequence
SGGSSGGSSGSETPGTSESATPESSGGSSGGS

SEQ ID NO: 358 - protein, 104 aa, synthetic construct
  REGION 1..104: note = synthetic polypeptide sequence
GGSGGSPGSPAGSPTSTEEGTSESATPESGPGTSTEPSEGSAPGSPAGSPTSTEEGTSTEPSEGSAPGTSTEPSEGSAPGTSESATPESGPGSEPATSGGSGGS

SEQ ID NO: 359 - protein, 24 aa, synthetic construct
  REGION 1..24: note = synthetic peptide sequence
SGGSSGGSSGSETPGTSESATPES

SEQ ID NO: 360 - protein, 40 aa, synthetic construct
  REGION 1..40: note = synthetic polypeptide sequence
SGGSSGGSSGSETPGTSESATPESSGGSSGGSSGGSSGGS

SEQ ID NO: 361 - protein, 64 aa, synthetic construct
  REGION 1..64: note = synthetic polypeptide sequence
SGGSSGGSSGSETPGTSESATPESSGGSSGGSSGGSSGGSSGSETPGTSESATPESSGGSSGGS

SEQ ID NO: 362 - protein, 92 aa, synthetic construct
  REGION 1..92: note = synthetic polypeptide sequence
PGSPAGSPTSTEEGTSESATPESGPGTSTEPSEGSAPGSPAGSPTSTEEGTSTEPSEGSAPGTSTEPSEGSAPGTSESATPESGPGSEPATS

SEQ ID NO: 363 - protein, 5 aa, synthetic construct
  REGION 1..5: note = synthetic peptide sequence
PAPAP

SEQ ID NO: 364 - protein, 6 aa, synthetic construct
  REGION 1..6: note = synthetic peptide sequence
PAPAPA

SEQ ID NO: 365 - protein, 7 aa, synthetic construct
  REGION 1..7: note = synthetic peptide sequence
PAPAPAP

SEQ ID NO: 366 - protein, 8 aa, synthetic construct
  REGION 1..8: note = synthetic peptide sequence
PAPAPAPA

SEQ ID NO: 367 - protein, 9 aa, synthetic construct
  REGION 1..9: note = synthetic peptide sequence
PAPAPAPAP

SEQ ID NO: 368 - protein, 15 aa, synthetic construct
  REGION 1..15: note = synthetic peptide sequence
PAPAPAPAPAPAPAP

SEQ ID NO: 369 - protein, 21 aa, synthetic construct
  REGION 1..21: note = synthetic peptide sequence
PAPAPAPAPAPAPAPAPAPAP

SEQ ID NO: 370 - DNA, 306 bp, synthetic construct
  misc_feature 1..306: note = DnaE Intein-N polynucleotide sequence
  source 1..306: mol_type = other DNA
tgcctgtcatacgaaaccgagatactgacagtagaatatggccttctgccaatcgggaagattgtggagaaacggatagaatgcacagtttactctgtcgataacaatggtaacatttatactcagccagttgcccagtggcacgaccggggagagcaggaagtattcgaatactgtctggaggatggaagtctcattagggccactaaggaccacaaatttatgacagtcgatggccagatgctgcctatagacgaaatctttgagcgagagttggacctcatgcgagttgacaaccttcctaat

SEQ ID NO: 371 - protein, 102 aa, synthetic construct
  REGION 1..102: note = DnaE Intein-N polypeptide sequence
CLSYETEILTVEYGLLPIGKIVEKRIECTVYSVDNNGNIYTQPVAQWHDRGEQEVFEYCLEDGSLIRATKDHKFMTVDGQMLPIDEIFERELDLMRVDNLPN

SEQ ID NO: 372 - DNA, 108 bp, synthetic construct
  misc_feature 1..108: note = DnaE Intein-C polynucleotide sequence
  source 1..108: mol_type = other DNA
atgatcaagatagctacaaggaagtatcttggcaaacaaaacgtttatgatattggagtcgaaagagatcacaactttgctctgaagaacggattcatagcttctaat

SEQ ID NO: 373 - protein, 36 aa, synthetic construct
  REGION 1..36: note = DnaE Intein-C polypeptide sequence
MIKIATRKYLGKQNVYDIGVERDHNFALKNGFIASN

SEQ ID NO: 374 - DNA, 303 bp, synthetic construct
  misc_feature 1..303: note = Cfa-N polynucleotide sequence
  source 1..303: mol_type = other DNA
tgcctgtcttatgataccgagatacttaccgttgaatatggcttcttgcctattggaaagattgtcgaagagagaattgaatgcacagtatatactgtagacaagaatggtttcgtttacacacagcccattgctcaatggcacaatcgcggcgaacaagaagtatttgagtactgtctcgaggatggaagcatcatacgagcaactaaagatcataaattcatgaccactgacgggcagatgttgccaatagatgagatattcgagcggggcttggatctcaaacaagtggatggattgcca

SEQ ID NO: 375 - protein, 101 aa, synthetic construct
  REGION 1..101: note = Cfa-N polypeptide sequence
CLSYDTEILTVEYGFLPIGKIVEERIECTVYTVDKNGFVYTQPIAQWHNRGEQEVFEYCLEDGSIIRATKDHKFMTTDGQMLPIDEIFERGLDLKQVDGLP

SEQ ID NO: 376 - DNA, 159 bp, synthetic construct
  misc_feature 1..159: note = Cfa-C polynucleotide sequence
  source 1..159: mol_type = other DNA
atgaagaggactgccgatggatcagagtttgaatctcccaagaagaagaggaaagtaaagataatatctcgaaaaagtcttggtacccaaaatgtctatgatattggagtggagaaagatcacaacttccttctcaagaacggtctcgtagccagcaac

SEQ ID NO: 377 - protein, 53 aa, synthetic construct
  REGION 1..53: note = Cfa-C polypeptide sequence
MKRTADGSEFESPKKKRKVKIISRKSLGTQNVYDIGVEKDHNFLLKNGLVASN

SEQ ID NO: 378 - protein, 1081 aa, Neisseria meningitidis
  REGION 1..1081: note = MISC_FEATURE - Nme3Cas9; WP_002217928.1 type II CRISPR RNA-guided endonuclease Cas9 [Neisseria meningitidis]
  REGION 1..1081: note = MISC_FEATURE - NCBI Reference: WP_002217928.1; type II CRISPR RNA-guided endonuclease Cas9; Nme3Cas9 polypeptide sequence
MAAFKPNPINYILGLDIGIASVGWAMVEIDEEENPIRLIDLGVRVFERAEVPKTGDSLAMARRLARSVRRLTRRRAHRLLRARRLLKREGVLQAADFDENGLIKSLPNTPWQLRAAALDRKLTPLEWSAVLLHLIKHRGYLSQRKNEGETADKELGALLKGVADNAHALQTGDFRTPAELALNKFEKECGHIRNQRGDYSHTFSRKDLQAELNLLFEKQKEFGNPHVSGGLKEGIETLLMTQRPALSGDAVQKMLGHCTFEPAEPKAAKNTYTAERFIWLTKLNNLRILEQGSERPLTDTERATLMDEPYRKSKLTYAQARKLLSLEDTAFFKGLRYGKDNAEASTLMEMKAYHTISRALEKEGLKDKKSPLNLSPELQDEIGTAFSLFKTDEDITGRLKDRIQPEILEALLKHISFDKFVQISLKALRRIVPLMEQGKRYDEACAEIYGDHYGKKNTEEKIYLPPIPADEIRNPVVLRALSQARKVINGVVRRYGSPARIHIETAREVGKSFKDRKEIEKRQEENRKDREKAAAKFREYFPNFVGEPKSKDILKLRLYEQQHGKCLYSGKEINLGRLNEKGYVEIDHALPFSRTWDDSFNNKVLVLGSENQNKGNQTPYEYFNGKDNSREWQEFKARVETSRFPRSKKQRILLQKFDEDGFKERNLNDTRYVNRFLCQFVADRMRLTGKGKKRVFASNGQITNLLRGFWGLRKVRAENDRHHALDAVVVACSTVAMQQKITRFVRYKEMNAFDGKTIDKETGEVLHQKTHFPQPWEFFAQEVMIRVFGKPDGKPEFEEADTPEKLRTLLAEKLSSRPEAVHEYVTPLFVSRAPNRKMSGQGHMETVKSAKRLDEGVSVLRVPLTQLKLKDLEKMVNREREPKLYEALKARLEAHKDDPAKAFAEPFYKYDKAGNRTQQVKAVRVEQVQKTGVWVRNHNGIADNATMVRVDVFEKGDKYYLVPIYSWQVAKGILPDRAVVAYADEEDWTVIDESFRFKFVLYSNDLIKVQLKKDSFLGYFSGLDRATGAISLREHDLEKSKGKDGMHRIGVKTALSFQKYQIDEMGKEIRPCRLKKRPPVR

SEQ ID NO: 379 - RNA, 66 nt, synthetic construct
  misc_feature 1..66: note = Telomerase Ku Binding Motif oligonucleotide sequence
  source 1..66: mol_type = other RNA
ttcttgtcgtacttatagatcgctacgttatttcaattttgaaaatctgagtcctgggagtgcgga

SEQ ID NO: 380 - protein, 1094 aa, synthetic construct
  REGION 1..1094: note = Telomerase Ku Heterodimer polypeptide sequence
MSGWESYYKTEGDEEAEEEQEENLEASGDYKYSGRDSLIFLVDASKAMFESQSEDELTPFDMSIQCIQSVYISKIISSDRDLLAVVFYGTEKDKNSVNFKNIYVLQELDNPGAKRILELDQFKGQQGQKRFQDMMGHGSDYSLSEVLWVCANLFSDVQFKMSHKRIMLFTNEDNPHGNDSAKASRARTKAGDLRDTGIFLDLMHLKKPGGFDISLFYRDIISIAEDEDLRVHFEESSKLEDLLRKVRAKETRKRALSRLKLKLNKDIVISVGIYNLVQKALKPPPIKLYRETNEPVKTKTRTFNTSTGGLLLPSDTKRSQIYGSRQIILEKEETEELKRFDDPGLMLMGFKPLVLLKKHHYLRPSLFVYPEESLVIGSSTLFSALLIKCLEKEVAALCRYTPRRNIPPYFVALVPQEEELDDQKIQVTPPGFQLVFLPFADDKRKMPFTEKIMATPEQVGKMKAIVEKLRFTYRSDSFENPVLQQHFRNLEALALDLMEPEQAVDLTLPKVEAMNKRLGSLVDEFKELVYPPDYNPEGKVTKRKHDNEGSGSKRPKVEYSEEELKTHISKGTLGKFTVPMLKEACRAYGLKSGLKKQELLEALTKHFQDMVRSGNKAAVVLCMDVGFTMSNSIPGIESPFEQAKKVITMFVQRQVFAENKDEIALVLFGTDGTDNPLSGGDQYQNITVHRHLMLPDFDLLEDIESKIQPGSQQADFLDALIVSMDVIQHETIGKKFEKRHIEIFTDLSSRFSKSQLDIIIHSLKKCDISERHSIHWPCRLTIGSNLSIRIAAYKSILQERVKKTWTVVDAKTLKKEDIQKETVYCLNDDDETEVLKEDIIQGFRYGSDIVPFSKVDEEQMKYKSEGKCFSVLGFCKSSQVQRRFFMGNQVLKVFAARDDEAAAVALSSLIHALDDLDMVAIVRYAYDKRANPQVGVAFPHIKHNYECLVYVQLPFMEDLRQYMFSSLKNSKKYAPTEAQLNAVDALIDSMSLAKKDEKTDTLEDLFPTTKIPNPRFQRLFQCLLHRALHPREPLPPIQQHIWNMLNPPAEVTTKSQIPLSKIKTLFPLIEAKKKDQVTAQEIFQDNHEDGPTAK

SEQ ID NO: 381 - RNA, 10 nt, synthetic construct
  misc_feature 1..10: note = Telomerase Sm7 consensus site(single stranded) oligonucleotide sequence
  source 1..10: mol_type = other RNA
aatttttgga

SEQ ID NO: 382 - protein, 83 aa, synthetic construct
  REGION 1..83: note = MS2 coat protein polypeptide sequence
GSVIDVSSQRVNVQRPLDALGNSLNSPVIIKLKGDREFRGVLKSFDLHMNLVLNDAEELEDGEVTRRLGTVLIRGDNIVYISP

SEQ ID NO: 383 - RNA, 26 nt, synthetic construct
  misc_feature 1..26: note = PP7 phage operator stem loop oligonucleotide sequence
  source 1..26: mol_type = other RNA
ataaggagtttatatggaaaccctta

SEQ ID NO: 384 - protein, 128 aa, synthetic construct
  REGION 1..128: note = PP7 coat protein (PCP)polypeptide sequence
MSKTIVLSVGEATRTLTEIQSTADRQIFEEKVGPLVGRLRLTASLRQNGAKTAYRVNLKLDQADVVDCSTSVCGELPKVRYTQVWSHDVTIVANSTEASRKSLYDLTKSLVATSQVEDLVVNLVPLGR

SEQ ID NO: 385 - RNA, 19 nt, synthetic construct
  misc_feature 1..19: note = SfMu Com stem loop oligonucleotide sequence
  source 1..19: mol_type = other RNA
ctgaatgcctgcgagcatc

SEQ ID NO: 386 - protein, 62 aa, synthetic construct
  REGION 1..62: note = SfMu Com binding protein polypeptide sequence
MKSIRCKNCNKLLFKADSFDHIEIRCPRCKRHIIMLNACEHPTEKHCGKREKITHSDETVRY

SEQ ID NO: 387 - protein, 47 aa, synthetic construct
  REGION 1..47: note = leucine zipper polypeptide sequence
LEIRAAFLRQRNTALRTEVAELEQEVQRLENEVSQYETRYGPLGGGK

SEQ ID NO: 388 - protein, 47 aa, synthetic construct
  REGION 1..47: note = leucine zipper polypeptide sequence
LEIEAAFLERENTALETRVAELRQRVQRLRNRVSQYRTRYGPLGGGK

SEQ ID NO: 389 - DNA, 303 bp, synthetic construct
  source 1..303: mol_type = other DNA
tgcctgagctacgataccgagatcctgaccgtggaatacggcttcctgcctatcggcaagatcgtcgaggaacggatcgagtgcacagtgtacaccgtggataagaatggcttcgtgtacacccagcctatcgctcagtggcacaacagaggcgagcaagaggtgttcgagtactgcctggaagatggcagcatcatccgggccaccaaggaccacaagtttatgaccaccgacggccagatgctgcccatcgacgagatctttgagagaggcctggacctgaaacaggtggacggactgcct

SEQ ID NO: 390 - protein, 101 aa, synthetic construct; identical to SEQ ID NO: 375

SEQ ID NO: 391 - DNA, 264 bp, synthetic construct
  source 1..264: mol_type = other DNA
tgtctggacctcaagacccaagtgcagacacctcagggcatgaaagagattagcaatatccaggtgggcgacctggtcctgagcaacaccggctacaacgaggtgctgaacgtgttccctaagtccaagaagaaatcttataagatcaccctggaagatggcaaggaaatcatctgcagcgaggaacacctgttccccacccagaccggcgagatgaacatcagcggcggactgaaggagggcatgtgcctgtacgtgaaggag

SEQ ID NO: 392 - protein, 88 aa, synthetic construct
CLDLKTQVQTPQGMKEISNIQVGDLVLSNTGYNEVLNVFPKSKKKSYKITLEDGKEIICSEEHLFPTQTGEMNISGGLKEGMCLYVKE

SEQ ID NO: 393 - DNA, 267 bp, synthetic construct
  source 1..267: mol_type = other DNA
tgcctgagcctggacaccatggtggtgacaaacggcaaggccatcgagatcagagatgtgaaggtgggagattggctggaaagcgaatgtggcccagtgcaggttacagaggtgctgcctatcatcaagcagcctgtctttgagattgtgctgaaaagcggaaaaaagatccgggtgtccgctaatcacaagttccccaccaaggacggcctcaagaccatcaacagcggcctgaaggtgggcgacttcctgagaagcagagccaag

SEQ ID NO: 394 - protein, 89 aa, synthetic construct
CLSLDTMVVTNGKAIEIRDVKVGDWLESECGPVQVTEVLPIIKQPVFEIVLKSGKKIRVSANHKFPTKDGLKTINSGLKVGDFLRSRAK

SEQ ID NO: 395 - DNA, 303 bp, synthetic construct
  source 1..303: mol_type = other DNA
tgttttgtgcctggcaccctggtgaacacagagaatggcctgaagaaaatcgaggaaatcaaggtgggcgacaaggtgttcagccatacaggcaagctgcaggaggtggtggacaccctgatcttcgaccgggacgaggaaatcatctctatcaacggcattgattgcaccaagaaccacgagttctacgtgatcgataaggaaaacgctaatagagtgaacgaggacaacatccacctcttcgccagatgggtccacgccgaggaactggatatgaaaaagcacctgctgatcgagctggaa

SEQ ID NO: 396 - protein, 101 aa, synthetic construct
CFVPGTLVNTENGLKKIEEIKVGDKVFSHTGKLQEVVDTLIFDRDEEIISINGIDCTKNHEFYVIDKENANRVNEDNIHLFARWVHAEELDMKKHLLIELE

SEQ ID NO: 397 - DNA, 315 bp, synthetic construct
  source 1..315: mol_type = other DNA
tgcctggtgggctctagcgagattatcacaagaaactacggcaagaccaccatcaaggaagtggtcgagatcttcgacaacgacaagaatatccaggtgctggccttcaacacccacaccgataatatcgagtgggcccctatcaaggccgctcagctgaccagacctaacgccgagctggttgaactggaaatcgacaccctgcacggcgtgaaaacaatccggtgcacccctgaccaccccgtgtacaccaagaacagaggctacgtgcgggccgacgagctgacagatgatgacgagctcgtggtggctatc

SEQ ID NO: 398 - protein, 105 aa, synthetic construct
CLVGSSEIITRNYGKTTIKEVVEIFDNDKNIQVLAFNTHTDNIEWAPIKAAQLTRPNAELVELEIDTLHGVKTIRCTPDHPVYTKNRGYVRADELTDDDELVVAI

SEQ ID NO: 399 - DNA, 306 bp, synthetic construct
  source 1..306: mol_type = other DNA
tgcctgagctacgagacagagatcctgaccgtggaatatggcctgctgccaatcggaaagatcgtggaaaagcggatcgagtgcaccgtctacagcgtggacaacaacggaaatatctatacacagcctgtggcccaatggcacgaccggggcgaacaggaggtgtttgagtactgcctggaagatggttctctgattagagccaccaaggaccacaagttcatgaccgtcgacggccagatgctgcccatcgacgaaatcttcgagcgggaactcgacctgatgagagtggataacctgcccaat

SEQ ID NO: 400 - protein, 102 aa, synthetic construct; identical to SEQ ID NO: 371

SEQ ID NO: 401 - protein, 101 aa, synthetic construct; identical to SEQ ID NO: 375

SEQ ID NO: 402 - protein, 102 aa, synthetic construct; identical to SEQ ID NO: 371

SEQ ID NO: 403 - DNA, 279 bp, synthetic construct
  source 1..279: mol_type = other DNA
acaagaagcggatactgtctggacctcaagacccaagtgcagacacctcagggcatgaaagagattagcaatatccaggtgggcgacctggtcctgagcaacaccggctacaacgaggtgctgaacgtgttccctaagtccaagaagaaatcttataagatcaccctggaagatggcaaggaaatcatctgcagcgaggaacacctgttccccacccagaccggcgagatgaacatcagcggcggactgaaggagggcatgtgcctgtacgtgaaggag

SEQ ID NO: 404 - protein, 93 aa, synthetic construct
TRSGYCLDLKTQVQTPQGMKEISNIQVGDLVLSNTGYNEVLNVFPKSKKKSYKITLEDGKEIICSEEHLFPTQTGEMNISGGLKEGMCLYVKE

SEQ ID NO: 405 - DNA, 282 bp, synthetic construct
  source 1..282: mol_type = other DNA
tctcagctgaaccggtgcctgagcctggacaccatggtggtgacaaacggcaaggccatcgagatcagagatgtgaaggtgggagattggctggaaagcgaatgtggcccagtgcaggttacagaggtgctgcctatcatcaagcagcctgtctttgagattgtgctgaaaagcggaaaaaagatccgggtgtccgctaatcacaagttccccaccaaggacggcctcaagaccatcaacagcggcctgaaggtgggcgacttcctgagaagcagagccaag

SEQ ID NO: 406 - protein, 94 aa, synthetic construct
SQLNRCLSLDTMVVTNGKAIEIRDVKVGDWLESECGPVQVTEVLPIIKQPVFEIVLKSGKKIRVSANHKFPTKDGLKTINSGLKVGDFLRSRAK

SEQ ID NO: 407 - DNA, 318 bp, synthetic construct
  source 1..318: mol_type = other DNA
ggcatcggcggaggatgttttgtgcctggcaccctggtgaacacagagaatggcctgaagaaaatcgaggaaatcaaggtgggcgacaaggtgttcagccatacaggcaagctgcaggaggtggtggacaccctgatcttcgaccgggacgaggaaatcatctctatcaacggcattgattgcaccaagaaccacgagttctacgtgatcgataaggaaaacgctaatagagtgaacgaggacaacatccacctcttcgccagatgggtccacgccgaggaactggatatgaaaaagcacctgctgatcgagctggaa

SEQ ID NO: 408 - protein, 106 aa, synthetic construct
GIGGGCFVPGTLVNTENGLKKIEEIKVGDKVFSHTGKLQEVVDTLIFDRDEEIISINGIDCTKNHEFYVIDKENANRVNEDNIHLFARWVHAEELDMKKHLLIELE

SEQ ID NO: 409 - DNA, 330 bp, synthetic construct
  source 1..330: mol_type = other DNA
ggaacaaacccatgttgcctggtgggctctagcgagattatcacaagaaactacggcaagaccaccatcaaggaagtggtcgagatcttcgacaacgacaagaatatccaggtgctggccttcaacacccacaccgataatatcgagtgggcccctatcaaggccgctcagctgaccagacctaacgccgagctggttgaactggaaatcgacaccctgcacggcgtgaaaacaatccggtgcacccctgaccaccccgtgtacaccaagaacagaggctacgtgcgggccgacgagctgacagatgatgacgagctcgtggtggctatc

SEQ ID NO: 410 - protein, 110 aa, synthetic construct
GTNPCCLVGSSEIITRNYGKTTIKEVVEIFDNDKNIQVLAFNTHTDNIEWAPIKAAQLTRPNAELVELEIDTLHGVKTIRCTPDHPVYTKNRGYVRADELTDDDELVVAI

SEQ ID NO: 411 - DNA, 105 bp, synthetic construct
  source 1..105: mol_type = other DNA
gtcaagatcatcagcagaaagagcctgggcacccagaacgtgtacgatatcggagtgggcgagccccacaactttctgctcaagaatggcctggtggccagcaac

SEQ ID NO: 412 - protein, 35 aa, synthetic construct
VKIISRKSLGTQNVYDIGVGEPHNFLLKNGLVASN

SEQ ID NO: 413 - DNA, 114 bp, synthetic construct
  source 1..114: mol_type = other DNA
atgatgctgaaaaagatcctgaagatcgaggaactggatgagagagagctgatcgacatcgaagtgtctggcaatcacctgttctacgccaacgacatcctgacccacaacagc

SEQ ID NO: 414 - protein, 38 aa, synthetic construct
MMLKKILKIEELDERELIDIEVSGNHLFYANDILTHNS

SEQ ID NO: 415 - DNA, 138 bp, synthetic construct
  source 1..138: mol_type = other DNA
atgtgcgaaatcttcgagaacgagattgattgggacgaaatcgcctctatcgagtacgtgggcgtggaagagacaatcgacatcaacgtgaccaacgacagactgtttttcgccaatggcatcctgacccacaacagc

SEQ ID NO: 416 - protein, 46 aa, synthetic construct
MCEIFENEIDWDEIASIEYVGVEETIDINVTNDRLFFANGILTHNS

SEQ ID NO: 417 - DNA, 123 bp, synthetic construct
  source 1..123: mol_type = other DNA
atgaaattcaagctgaaggaaatcaccagcatcgagacaaagcactacaagggcaaggtgcacgatctgaccgtgaaccaggaccacagctacaacgtcagaggcaccgtggtgcataattct

SEQ ID NO: 418 - protein, 41 aa, synthetic construct
MKFKLKEITSIETKHYKGKVHDLTVNQDHSYNVRGTVVHNS

SEQ ID NO: 419 - DNA, 123 bp, synthetic construct
  source 1..123: mol_type = other DNA
atggaagccaagacctacatcggcaagctgaaatctagaaagatcgtgtccaacgaggatacatacgacatccagaccagcacccacaatttcttcgccaacgacatcctggtgcacaacagc

SEQ ID NO: 420 - protein, 41 aa, synthetic construct
MEAKTYIGKLKSRKIVSNEDTYDIQTSTHNFFANDILVHNS

SEQ ID NO: 421 - DNA, 108 bp, synthetic construct
  source 1..108: mol_type = other DNA
atgatcaagatcgccacaagaaagtacctgggcaagcagaacgtgtacgacatcggcgtggagagagaccacaacttcgccctgaagaacggctttatcgcctctaat

SEQ ID NO: 422 - protein, 36 aa, synthetic construct; identical to SEQ ID NO: 373

SEQ ID NO: 423 - protein, 36 aa, synthetic construct
MVKIISRKSLGTQNVYDIGVGEPHNFLLKNGLVASN

SEQ ID NO: 424 - protein, 35 aa, synthetic construct
IKIATRKYLGKQNVYDIGVERDHNFALKNGFIASN

SEQ ID NO: 425 - protein, 192 aa, Alligator mississippiensis; identical to SEQ ID NO: 68

SEQ ID NO: 426 - DNA, 576 bp, Alligator mississippiensis
  source 1..576: mol_type = other DNA
atggccgacagctccgagaagatgaggggccagtacatcagccgcgacacctttgagaagaattataagcccatcgatggcacaaaggaggcccacctgctgtgcgagatcaagtggggcaagtacggcaagccttggctgcactggtgtcagaatcagcggatgaacatccacgccgaggactatttcatgaacaatatctttaaggccaagaagcaccctgtgcactgctacgtgacctggtatctgtcttggagcccatgcgccgattgtgcctccaagatcgtgaagttcctggaggagcggccctacctgaagctgaccatctatgtggcccagctgtactatcacacagaggaggagaataggaagggcctgcggctgctgcggagcaagaaagtgatcatccgcgtgatggacatctccgattacaactattgctggaaggtgttcgtgtctaaccagaatggcaacgaggactactggccactgcagtttgatccctgggtgaaggagaattattctcggctgctggatatcttctgggagtccaagtgtagatctcccaacccttgg

SEQ ID NO: 427 - protein, 236 aa, Pongo pygmaeus; identical to SEQ ID NO: 23

SEQ ID NO: 428 - DNA, 708 bp, Pongo pygmaeus
  source 1..708: mol_type = other DNA
atgacctctgagaagggccctagcacaggcgaccccaccctgcggcggagaatcgagagctgggagttcgacgtgttctacgaccctagagaactgagaaaggaaacctgcctgctgtacgagatcaagtggggcatgagcagaaagatctggcggagctctggcaagaacaccaccaaccacgtggaagtgaatttcatcaagaagttcaccagcgagagaaggttccacagcagcatcagctgcagcatcacctggttcctgagctggtccccttgctgggaatgcagccaggccatcagagagttcctgagccaacaccccggagtgacactggtgatctacgtggccagactgttctggcacatggaccagagaaacagacagggcctgagagatctggtcaacagcggcgtgactatccagatcatgcgggccagcgagtactaccactgttggcggaacttcgtgaactacccccccggcgatgaggcccactggcctcagtaccctcctctgtggatgatgctgtacgccctggaactgcactgcatcatcctgtctctgcctccatgtctgaagatctctagaagatggcagaaccacctggccttcttcagactgcacctgcagaattgccactaccagaccatccccccccacatcctgctggctacaggcctgatccacccttctgtgacctggaga

SEQ ID NO: 429 - protein, 229 aa, Rattus sp. [sequence omitted]

SEQ ID NO: 430 - DNA, 687 bp, Rattus sp.
  source 1..687: mol_type = other DNA
atgagcagcgagacaggccctgtggctgtggatcctacactgcggagaagaatcgagccccacgagttcgaggtgttcttcgaccccagagagctgcggaaagagacatgcctgctgtacgagatcaactggggcggcagacactctatctggcggcacacaagccagaacaccaacaagcacgtggaagtgaactttatcgagaagtttacgaccgagcggtacttctgccccaacaccagatgcagcatcacctggtttctgagctggtccccttgcggcgagtgcagcagagccatcaccgagtttctgtccagatatccccacgtgaccctgttcatctatatcgcccggctgtaccaccacgccgatcctagaaatagacagggactgcgcgacctgatcagcagcggagtgaccatccagatcatgaccgagcaagagagcggctactgctggcggaacttcgtgaactacagccccagcaacgaagcccactggcctagatatcctcacctgtgggtccgactgtacgtgctggaactgtactgcatcatcctgggcctgcctccatgcctgaacatcctgagaagaaagcagcctcagctgaccttcttcacaatcgccctgcagagctgccactaccagagactgcctccacacatcctgtgggccaccggacttaag

SEQ ID NO: 431 - protein, 194 aa, Rhinopithecus roxellana; identical to SEQ ID NO: 67

SEQ ID NO: 432 - DNA, 582 bp, Rhinopithecus roxellana
  source 1..582: mol_type = other DNA
atgaagccccagatcagggaccaccgccccaatcctatggaggccatgtaccctcacatcttctattttcacttcgagaacctggagaaggcctacggccggaatgagacctggctgtgctttacagtggagatcatcaagcagtatctgccagtgccctggaagaagggcgtgttccggaaccaggtggatccagagacccactgccacgccgagaagtgttttctgtcctggttctgtaacaatacactgtctcccaagaagaattaccaggtgacctggtatacaagctggtccccttgcccagagtgtgcaggagaggtggcagagtttctggcagagcacagcaacgtgaagctgaccatctacacagcccggctgtactatttctgggacaccgattatcaggagggcctgagatctctgagcgaggagggcgcctccgtggagatcatggactacgaggattttcagtattgctgggagaacttcgtgtacgacgatggcgagccttttaagaggtggaagggcctgaagtataatttccagtctctgacacggagactgcgcgagatcctgcag

SEQ ID NO: 433 - protein, 280 aa, Sus scrofa; identical to SEQ ID NO: 69

SEQ ID NO: 434 - DNA, 840 bp, Sus scrofa
  source 1..840: mol_type = other DNA
atggacccacagaggctgcgccagtggcccggccctggcccagcaagcaggggcggctacggccagcggccaagaatcaggaaccccgaggagtggtttcacgagctgtctccccggaccttcagctttcacttccgcaacctgaggttcgcatccggccgcaatcggtcttatatctgctgtcaggtggagggcaagaactgcttctttcagggcatctttcagaatcaggtgccacctgacccaccatgccacgcagagctgtgcttcctgtcttggttccagagctggggcctgtcccccgatgagcactactatgtgacatggtttatctcttggagcccttgctgtgagtgtgccgccaaggtggcccagttcctggaggagaaccgcaacgtgagcctgtctctgagcgccgcaaggctgtactatttctggaagtccgagtctagagagggactgcggagactgagcgacctgggagcacaagtgggaatcatgtcctttcaggatttccagcactgctggaacaattttgtgcacaacctgggcatgcccttccagccttggaagaagctgcacaagaattaccagaggctggtgaccgagctgaagcagatcctgcgcgaggagcctgccacatatggctctccacaggcccagggcaaggtgagaatcggaagcaccgcagcaggactgaggcacagccactcccacacacgctccgaggcacacctgaggcctaaccacagctccagacagcacaggatcctgaatcctccacgggaggccagagccaggacctgcgtgctggtggatgcctcttggatctgttacaga

SEQ ID NO: 435 - protein, 2479 aa, Homo sapiens
MPPNINWKEIMKVDPDDLPRQEELADNLLISLSKVEVNELKSEKQENVIHLFRITQSLMKMKAQEVELALEEVEKAGEEQAKFENQLKTKVMKLENELEMAQQSAGGRDTRFLRNEICQLEKQLEQKDRELEDMEKELEKEKKVNEQLALRNEEAENENSKLRRENKRLKKKNEQLCQDIIDYQKQIDSQKETLLSRRGEDSDYRSQLSKKNYELIQYLDEIQTLTEANEKIEVQNQEMRKNLEESVQEMEKMTDEYNRMKAIVHQTDNVIDQLKKENDHYQLQVQELTDLLKSKNEEDDPIMVAVNAKVEEWKLILSSKDDEIIEYQQMLHNLREKLKNAQLDADKSNVMALQQGIQERDSQIKMLTEQVEQYTKEMEKNTCIIEDLKNELQRNKGASTLSQQTHMKIQSTLDILKEKTKEAERTAELAEADAREKDKELVEALKRLKDYESGVYGLEDAVVEIKNCKNQIKIRDREIEILTKEINKLELKISDFLDENEALRERVGLEPKTMIDLTEFRNSKHLKQQQYRAENQILLKEIESLEEERLDLKKKIRQMAQERGKRSATSGLTTEDLNLTENISQGDRISERKLDLLSLKNMSEAQSKNEFLSRELIEKERDLERSRTVIAKFQNKLKELVEENKQLEEGMKEILQAIKEMQKDPDVKGGETSLIIPSLERLVNAIESKNAEGIFDASLHLKAQVDQLTGRNEELRQELRESRKEAINYSQQLAKANLKIDHLEKETSLLRQSEGSNVVFKGIDLPDGIAPSSASIINSQNEYLIHLLQELENKEKKLKNLEDSLEDYNRKFAVIRHQQSLLYKEYLSEKETWKTESKTIKEEKRKLEDQVQQDAIKVKEYNNLLNALQMDSDEMKKILAENSRKITVLQVNEKSLIRQYTTLVELERQLRKENEKQKNELLSMEAEVCEKIGCLQRFKEMAIFKIAALQKVVDNSVSLSELELANKQYNELTAKYRDILQKDNMLVQRTSNLEHLECENISLKEQVESINKELEITKEKLHTIEQAWEQETKLGNESSMDKAKKSITNSDIVSISKKITMLEMKELNERQRAEHCQKMYEHLRTSLKQMEERNFELETKFAELTKINLDAQKVEQMLRDELADSVSKAVSDADRQRILELEKNEMELKVEVSKLREISDIARRQVEILNAQQQSRDKEVESLRMQLLDYQAQSDEKSLIAKLHQHNVSLQLSEATALGKLESITSKLQKMEAYNLRLEQKLDEKEQALYYARLEGRNRAKHLRQTIQSLRRQFSGALPLAQQEKFSKTMIQLQNDKLKIMQEMKNSQQEHRNMENKTLEMELKLKGLEELISTLKDTKGAQKVINWHMKIEELRLQELKLNRELVKDKEEIKYLNNIISEYERTISSLEEEIVQQNKFHEERQMAWDQREVDLERQLDIFDRQQNEILNAAQKFEEATGSIPDPSLPLPNQLEIALRKIKENIRIILETRATCKSLEEKLKEKESALRLAEQNILSRDKVINELRLRLPATAEREKLIAELGRKEMEPKSHHTLKIAHQTIANMQARLNQKEEVLKKYQRLLEKAREEQREIVKKHEEDLHILHHRLELQADSSLNKFKQTAWDLMKQSPTPVPTNKHFIRLAEMEQTVAEQDDSLSSLLVKLKKVSQDLERQREITELKVKEFENIKLQLQENHEDEVKKVKAEVEDLKYLLDQSQKESQCLKSELQAQKEANSRAPTTTMRNLVERLKSQLALKEKQQKALSRALLELRAEMTAAAEERIISATSQKEAHLNVQQIVDRHTRELKTQVEDLNENLLKLKEALKTSKNRENSLTDNLNDLNNELQKKQKAYNKILREKEEIDQENDELKRQIKRLTSGLQGKPLTDNKQSLIEELQRKVKKLENQLEGKVEEVDLKPMKEKNAKEELIRWEEGKKWQAKIEGIRNKLKEKEGEVFTLTKQLNTLKDLFAKADKEKLTLQRKLKTTGMTVDQVLGIRALESEKELEELKKRNLDLENDILYMRAHQALPRDSVVEDLHLQNRYLQEKLHALEKQFSKDTYSKPSISGIESDDHCQREQELQKENLKLSSENIELKFQLEQANKDLPRLKNQVRDLKEMCEFLKKEKAEVQRKLGHVRGSGRSGKTIPELEKTIGLMKKVVEKVQRENEQLKKASGILTSEKMANIEQENEKLKAELEKLKAHLGHQLSMHYESKTKGTEKIIAENERLRKELKKETDAAEKLRIAKNNLEILNEKMTVQLEETGKRLQFAESRGPQLEGADSKSWKSIVVTRMYETKLKELETDIAKKNQSITDLKQLVKEATEREQKVNKYNEDLEQQIKILKHVPEGAETEQGLKRELQVLRLANHQLDKEKAELIHQIEANKDQSGAESTIPDADQLKEKIKDLETQLKMSDLEKQHLKEEIKKLKKELENFDPSFFEEIEDLKYNYKEEVKKNILLEEKVKKLSEQLGVELTSPVAASEEFEDEEESPVNFPIY

SEQ ID NO: 436 - DNA, 7440 bp, Homo sapiens
  source 1..7440: mol_type = other DNA
atgccacctaatataaactggaaagaaataatgaaagttgacccagatgacctgccccgtcaagaagaactggcagataatttattgatttccttatccaaggtggaagtaaatgagctaaaaagtgaaaagcaagaaaatgtgatacaccttttcagaattactcagtcactaatgaagatgaaagctcaagaagtggagctggctttggaagaagtagaaaaagctggagaagaacaagcaaaatttgaaaatcaattaaaaactaaagtaatgaaactggaaaatgaactggagatggctcagcagtctgcaggtggacgagatactcggtttttacgtaatgaaatttgccaacttgaaaaacaattagaacaaaaagatagagaattggaggacatggaaaaggagttggagaaagagaagaaagttaatgagcaattggctcttcgaaatgaggaggcagaaaatgaaaacagcaaattaagaagagagaacaaacgtctaaagaaaaagaatgaacaactttgtcaggatattattgactaccagaaacaaatagattcacagaaagaaacacttttatcaagaagaggggaagacagtgactaccgatcacagttgtctaaaaaaaactatgagcttatccaatatcttgatgaaattcagactttaacagaagctaatgagaaaattgaagttcagaatcaagaaatgagaaaaaatttagaagagtctgtacaggaaatggagaagatgactgatgaatataatagaatgaaagctattgtgcatcagacagataatgtaatagatcagttaaaaaaagaaaacgatcattatcaacttcaagtgcaggagcttacagatcttctgaaatcaaaaaatgaagaagatgatccaattatggtagctgtcaatgcaaaagtagaagaatggaagctaattttgtcttctaaagatgatgaaattattgagtatcagcaaatgttacataacctaagggagaaacttaagaatgctcagcttgatgctgataaaagtaatgttatggctctacagcagggtatacaggaacgagacagtcaaattaagatgctcaccgaacaagtagaacaatatacaaaagaaatggaaaagaatacttgtattattgaagatttgaaaaatgagctccaaagaaacaaaggtgcttcaaccctttctcaacagactcatatgaaaattcagtcaacgttagacattttaaaagagaaaactaaagaggctgagagaacagctgaactggctgaggctgatgctagggaaaaggataaagaattagttgaggctctgaagaggttaaaagattatgaatcgggagtatatggtttagaagatgctgtcgttgaaataaagaattgtaaaaaccaaattaaaataagagatcgagagattgaaatattaacaaaggaaatcaataaacttgaattgaagatcagtgatttccttgatgaaaatgaggcacttagagagcgtgtgggccttgaaccaaagacaatgattgatttaactgaatttagaaatagcaaacacttaaaacagcagcagtacagagctgaaaaccagattcttttgaaagagattgaaagtctagaggaagaacgacttgatctgaaaaaaaaaattcgtcaaatggctcaagaaagaggaaaaagaagtgcaacttcaggattaaccactgaggacctgaacctaactgaaaacatttctcaaggagatagaataagtgaaagaaaattggatttattgagcctcaaaaatatgagtgaagcacaatcaaagaatgaatttctttcaagagaactaattgaaaaagaaagagatttagaaaggagtaggacagtgatagccaaatttcagaataaattaaaagaattagttgaagaaaataagcaacttgaagaaggtatgaaagaaatattgcaagcaattaaggaaatgcagaaagatcctgatgttaaaggaggagaaacatctctaattatccctagccttgaaagactagttaatgctatagaatcaaagaatgcagaaggaatctttgatgcgagtctgcatttgaaagcccaagttgatcagcttaccggaagaaatgaagaattaagacaggagctcagggaatctcggaaagaggctataaattattcacagcagttggcaaaagctaatttaaagatagaccatcttgaaaaagaaactagtcttttacgacaatcagaaggatcaaatgttgtttttaaaggaattgacttacctgatgggatagcaccatctagtgccagtatcattaattctcagaatgaatatttaatacatttgttacaggaactagaaaataaagaaaaaaagttaaagaatttagaagattctcttgaagattacaacagaaaatttgctgtaattcgtcatcaacaaagtttgttgtataaagaatacctaagtgaaaaggagacctggaaaacagaatctaaaacaataaaagaggaaaagagaaaacttgaggatcaagtccaacaagatgctataaaagtaaaagaatataataatttgctcaatgctcttcagatggattcggatgaaatgaaaaaaatacttgcagaaaatagtaggaaaattactgttttgcaagtgaatgaaaaatcacttataaggcaatatacaaccttagtagaattggagcgacaacttagaaaagaaaatgagaagcaaaagaatgaattgttgtcaatggaggctgaagtttgtgaaaaaattgggtgtttgcaaagatttaaggaaatggccattttcaagattgcagctctccaaaaagttgtagataatagtgtttctttgtctgaactagaactggctaataaacagtacaatgaactgactgctaagtacagggacatcttgcaaaaagataatatgcttgttcaaagaacaagtaacttggaacacctggagtgtgaaaacatctccttaaaagaacaagtggagtctataaataaagaactggagattaccaaggaaaaacttcacactattgaacaagcctgggaacaggaaactaaattaggtaatgaatctagcatggataaggcaaagaaatcaataaccaacagtgacattgtttccatttcaaaaaaaataactatgctggaaatgaaggaattaaatgaaaggcagcgggctgaacattgtcaaaaaatgtatgaacacttacggacttcgttaaagcaaatggaggaacgtaattttgaattggaaaccaaatttgctgagcttaccaaaatcaatttggatgcacagaaggtggaacagatgttaagagatgaattagctgatagtgtgagcaaggcagtaagtgatgctgataggcaacggattctagaattagagaagaatgaaatggaactaaaagttgaagtgtcaaaactgagagagatttctgatattgccagaagacaagttgaaattttgaatgcacaacaacaatctagggacaaggaagtagagtccctcagaatgcaactgctagactatcaggcacagtctgatgaaaagtcgctcattgccaagttgcaccaacataatgtctctcttcaactgagtgaggctactgctcttggtaagttggagtcaattacatctaaactgcagaagatggaggcctacaacttgcgcttagagcagaaacttgatgaaaaagaacaggctctctattatgctcgtttggagggaagaaacagagcaaaacatctgcgccaaacaattcagtctctacgacgacagtttagtggagctttacccttggcacaacaggaaaagttctccaaaacaatgattcaactacaaaatgacaaacttaagataatgcaagaaatgaaaaattctcaacaagaacatagaaatatggagaacaaaacattggagatggaattaaaattaaagggcctggaagagttaataagcactttaaaggataccaaaggagcccaaaaggtaatcaactggcatatgaaaatagaagaacttcgtcttcaagaacttaaactaaatcgggaattagtcaaggataaagaagaaataaaatatttgaataacataatttctgaatatgaacgtacaatcagcagtcttgaagaagaaattgtgcaacagaacaagtttcatgaagaaagacaaatggcctgggatcaaagagaagttgacctggaacgccaactagacatttttgaccgtcagcaaaatgaaatactaaatgcggcacaaaagtttgaagaagctacaggatcaatccctgaccctagtttgccccttccaaatcaacttgagatcgctctaaggaaaattaaggagaacattcgaataattctagaaacacgggcaacttgcaaatcactagaagagaaactaaaagagaaagaatctgctttaaggttagcagaacaaaatatactgtcaagagacaaagtaatcaatgaactgaggcttcgattgcctgccactgcagaaagagaaaagctcatagctgagctaggcagaaaagagatggaaccaaaatctcaccacacattgaaaattgctcatcaaaccattgcaaacatgcaagcaaggttaaatcaaaaagaagaagtattaaagaagtatcaacgtcttctagaaaaagccagagaggagcaaagagaaattgtgaagaaacatgaggaagaccttcatattcttcatcacagattagaactacaggctgatagttcactaaataaattcaaacaaacggcttgggatttaatgaaacagtctcccactccagttcctaccaacaagcattttattcgtctggctgagatggaacagacagtagcagaacaagatgactctctttcctcactcttggtcaaactaaagaaagtatcacaagatttggagagacaaagagaaatcactgaattaaaagtaaaagaatttgaaaatatcaaattacagcttcaagaaaaccatgaagatgaagtgaaaaaagtaaaagcggaagtagaggatttaaagtatcttctggaccagtcacaaaaggagtcacagtgtttaaaatctgaacttcaggctcaaaaagaagcaaattcaagagctccaacaactacaatgagaaatctagtagaacggctaaagagccaattagccttgaaggagaaacaacagaaagcacttagtcgggcacttttagaactccgggcagaaatgacagcagctgctgaagaacgtattatttctgcaacttctcaaaaagaggcccatctcaatgttcaacaaatcgttgatcgacatactagagagctaaagacacaagttgaagatttaaatgaaaatcttttaaaattgaaagaagcacttaaaacaagtaaaaacagagaaaactcactaactgataatttgaatgacttaaataatgaactgcaaaagaaacaaaaagcctataataaaatacttagagagaaagaggaaattgatcaagagaatgatgaactgaaaaggcaaattaaaagactaaccagtggattacagggcaaacccctgacagataataaacaaagtctaattgaagaactccaaaggaaagttaaaaaactagagaaccaattagagggaaaggtggaggaagtagacctaaaacctatgaaagaaaagaatgctaaagaagaattaattaggtgggaagaaggtaaaaagtggcaagccaaaatagaaggaattcgaaacaagttaaaagagaaagagggggaagtctttactttaacaaagcagttgaatactttgaaggatctttttgccaaagccgataaagagaaacttactttgcagaggaaactaaaaacaactggcatgactgttgatcaggttttgggaatacgagctttggagtcagaaaaagaattggaagaattaaaaaagagaaatcttgacttagaaaatgatatattgtatatgagggcccaccaagctcttcctcgagattctgttgtagaagatttacatttacaaaatagatacctccaagaaaaacttcatgctttagaaaaacagttttcaaaggatacatattctaagccttcaatttcaggaatagagtcagatgatcattgtcagagagaacaggagcttcagaaggaaaacttgaagttgtcatctgaaaatattgaactgaaatttcagcttgaacaagcaaataaagatttgccaagattaaagaatcaagtcagagatttgaaggaaatgtgtgaatttcttaagaaagaaaaagcagaagttcagcggaaacttggccatgttagagggtctggtagaagtggaaagacaatcccagaactggaaaaaaccattggtttaatgaaaaaagtagttgaaaaagtccagagagaaaatgaacagttgaaaaaagcatcaggaatattgactagtgaaaaaatggctaatattgagcaggaaaatgaaaaattgaaggctgaattagaaaaacttaaagctcatcttgggcatcagttgagcatgcactatgaatccaagaccaaaggcacagaaaaaattattgctgaaaatgaaaggcttcgtaaagaacttaaaaaagaaactgatgctgcagagaaattacggatagcaaagaataatttagagatattaaatgagaagatgacagttcaactagaagagactggtaagagattgcagtttgcagaaagcagaggtccacagcttgaaggtgctgacagtaagagctggaaatccattgtggttacaagaatgtatgaaaccaagttaaaagaattggaaactgatattgccaaaaaaaatcaaagcattactgaccttaaacagcttgtaaaagaagcaacagagagagaacaaaaagttaacaaatacaatgaagaccttgaacaacagattaagattcttaaacatgttcctgaaggtgctgagacagagcaaggccttaaacgggagcttcaagttcttagattagctaatcatcagctggataaagagaaagcagaattaatccatcagatagaagctaacaaggaccaaagtggagctgaaagcaccatacctgatgctgatcaactaaaggaaaaaataaaagatctagagacacagctcaaaatgtcagatctagaaaagcagcatttgaaggaggaaataaagaagctgaaaaaagaactggaaaattttgatccttcattttttgaagaaattgaagatcttaagtataattacaaggaagaagtgaagaagaatattctcttagaagagaaggtaaaaaaactttcagaacaattgggagttgaattaactagccctgttgctgcttctgaagagtttgaagatgaagaagaaagtcctgttaatttccccatttactaa

SEQ ID NO: 437 - DNA, 32767 bp, Homo sapiens
  source 1..32767: mol_type = other DNA
attctggccttggcggagttggggatggtgtcgcctagcagccgctgccgctttggcttgctcgggaccatttggctggacccagagtccgcgtggaaccgcgatagggatctgtcagggcccgcggccgggtccagcttggtggttgcggtagtgagaggcctccgctggttgccaggcttggtctaggtgggtggatccttgtaagcaggattagcgagtcactccacgctcaggttctttagcctgagggcccgtgtgccacagcatagctaccccgcccttccagcctcgggtccctaatactgccttgcttcggttccagtttccgccgcacaacttcactcattccaaatgttaatttctgcgttttttttcagccccaattctgtttctccaaatcagggatgattgtcggccttccacagaccctcgcgcttgccaggattagggtgttcgcgcgcattgtgggtaggggtgtggaggaagggatccagaaatcttaagtattaacttagattagtgttagcaaggaagccgtcacattttatttagccgggacactctgacagtttgtgccgactgctatttttgatcaaggctattttgcccacttgtctattttgtggcccaattgtctgttttgctaacatcagaaagttataatgaaataatctgcaaaaaatgtaaggtgctagaaaaccaataatactgtgtaccttgaaaatgctaatatacacctgttttgttacagaggtggagcacagtgaaagaattcaagatgccacctaatataaactggaaagaaataatgaaagttgacccagatgacctgccccgtcaagaagaactggcagataatttattgatttccttatccaaggtgcttaattggtcaataataatagatatatacattaacttatgattaatttattaataaaatatgaatttatttttttcagggacaactataattgtcacaatctggaagtgttcttatattttgcttgaaggttataaaatataaaacagttgcttttctgtttacttaggtggaagtaaatgagctaaaaagtgaaaagcaagaaaatgtgatacaccttttcagaattactcagtcactaatgaaggtttgtatgtagtaggttttaactataggtttggctattagtggaactataaaaatctgttcttatataaggtaatctttgtgaaaatacctggtaatatctacatcaccactaaaaaatgcaatatatttaaatgtgaattaagtattttagtgtataaaacattgctagtttctacttaaagtttctaaaagggtgtgtaggggaaatagaatgagtatgttgaaaagtaacataaggaaatatatcttgaggtccaaatgacaaatgcagacaatgactgctatagggatttgttaagaggggaaatgatttaagagatgtcagaagacttcacaaaggatcaatactgaggagtagtgttagataagtggaaggcaatgcagtggtaagatagtaagggaattctagagctgttggttaccataaataaatactgagaacaggaaatatgtttattctttatatttgaggaaacaaggtgcagcaagtttgtagcagactgtagagaaaacaaatcttgggtaagtactttgagataggttgttgagggccttaaaggtgtattttatgctatcagcaattgagaaggcagtaaaggttttcgaaacacaattgataggtacaaaaatacaccttaagaaggcaaaactgagtatattatgtaggacaaactgaaggaaattggagctttgtagacatcacattatagcggagtttaaacctgaaattatggattagaataatagcaattggaacagaaaaaaagtagtggaaagacattacaaagggagatgttgcattactggatataagacttgaggacttgaggtaaaaaggagaatcaaaaatgtttcatgctattaaaaatctagaaattgtagtcttaagtaagaaaattgcctggcatggtggctcacgtctgtaatcccagcactttgggaggccaaggcaggaggattgcttgagcctgggagttcaagactagcctggataatatagtgagtccttgcctgtacgaaaaaatttgccgagcatgatggcacaccaagcatgatggcacgccaagcatgatggcatgcacctgtagtcccagctactcaggagactgagatgggaagattgcttgagcccaggaggcaggaggttgcagtgagctgagattgtgccactgcactccagcctgggtgacaaagtgaggccctatctcaaaagcaaaaaaaacaaaaacaaaaaccaaaaactatttattcagcaaatatttactgaacgtctccatgtgccagccattgctggcactaaggatcataacaaataaaacagaatttttattttcagtgcttacattccagtataaaggcatattgaaataacctttttttaatgtttagatgaaagctcaagaagtggagctggctttggaagaagtagaaaaagctggagaagaacaagcaaaatttggtaagcaccttggaaaaagtttattatggtattaaataatgaattccatttgttcattaaactgtagaaaattaaattatattctataaaatatatatattcagtttatttttaatatataacatttaataataaatatttctagactcctattttatggatctgccatataatactttttgttaccttataatcatgatggactcttttaaaagaattaattttgttattgaaatttatttaaaagtttgttttgtggtaactaatcaattaaaacgtttttctttttttttaaaaaaatagaaaatcaattaaaaactaaagtaatgaaactggaaaatgaactggaggtatgtctttttgtattccctaggatgtaattgtcattaattttattttgaattgttttcaaattttaaaattattgttggctggaaaaattataaggatgattgtaatcatggttatttgtttattctgtatatgttctacatgcctattatgtgccttatatagtactaaggactgagcatatggttgtgaacaaaataagaagttaactgctggatggagcttatagtcttgggaaatatacagaaagattactagtaactgaggtggagggtgggtggggatttgaggaatagtgacgaaagggtgttatagaagtaatttttgacaaagctgaaggctaaaatatgaatgtattgttgaagaacaaaatacattgagattcctgagaaggtaggaatgtgatacaaatggatcagcctttgaaaggaggaatacccttttcctttgtgttaggagaggaggatgagtggatgagcgtgggaagagtggatgtgtatagaggcttttatgtttgtaggcataatgcttggaagttgaggggttggtgatgacatcttctgttaaaaagagtgggaaatggtgtggtcacattttaaggaaattaggtaaaatttgaaatatattggagacaggactggagagttggggatctggagtcagacagatttgagttctagtcctgattcttctactcgttaactctctgaacttggatgacctattgtttttgattgtatatccagctcctgggaaaatgccaagcactttcaataaatactaaatgaattatggagttggatcagttctgtgttagtgtttagctaggtagctgctgtagaatagaagggtagcacagttgaagatattggtaggaaagtggttgaagtgatgattatgaagtcttaactgaatagataaaatcaagattggggttgggtgggcagaagggtagggatatggagggagaagatgaggggttagagtgtcctgtgaggtcgaaggacaggcatagtgggaataattgaaagaatgttctggttggacaaggatctgatgtgggtgtgggagtgagagactatagtgaattcaagaaaaaaatagactagaacaaaagttatgtggagattgcttagtgggcatttgatagacatctgtgggccacatgcttaaattcccagtgcattttgcggagttactggaaggttggtggcttgtttctaccatgagtaggtaaagatggagagcaggatattttgtgagaaagcagctgaagtttctataggatgatggaggaatgataggaatgatcacctgaagttgcagggtggggtaaacctagaagcaccaacaccttcttctgaccctcatgtatttggaatctgaaagaatgagcaccttccaattgaaagagttccaagggcattagtatactaaaggatccaaattgcagctaagccaaggagatggaaaggaggattcagtaaagaatctgaggatgtgaaatattaatttatcttggaagagaattttagagagcacaatggaatgctttttggaggagagaaagagtaagaacaatttggttaaggtagaggaataacagaactataaggtgaagaaatgaatgtgagacacattagatgaccaaatgatttgatgttcttggccatgacctgaattaacaagactgtgaggtaaaatggatttaatcggctacaaatcttaagataaccaaaacctgagctgtttaatatggtagcactagcactaaccacttgtagctatttatatttacattggttaaaattaaaatgaaaaatttagttcttcagttgcactagccacacttcaaatgcccgaacatagctacatgtagcgagtggctattgaactggacagcactgacagcatgtccattatgctagaaagtcctatgggacagcactggtctaaacagtgcatggtatgagagaaagggcaggttaaggcactcagcttcactgactggggtggagattctgatggtttgtactcaggttccagatccctgaggctcaggaacctttgcagtttagtctggttacctgtggcccagtggttacaacagaatgattaacagtcaattctttgcatctctgggtggctcaggaaaaatttaaggagttattagctgtgaactaaccttaagtaagttaaattaaaaaaaaaaaagttcttaagctaatatgattttaaatatctgcactgaagtataatgcaaatttaaattcagcataattatttgcttgttgttgactcatttgaacctcaaaatataatgggattaatttatactttgggtttattactttaagatggctcagcagtctgcaggtggacgagatactcggtttttacgtaatgaaatttgccaacttgaaaaacaattagaacaaaaagatagagaattggaggacatggaaaaggagttggagaaagagaagaaagttaatgagcaagtaaagcactttttttttccatgaatcttcactgttcaagttacctggctttttattattattggtaacaatatcaatttttatattgtatgttatatttgaaaaatgatgtacacttatctctaaggttttatatcactgttcattttgtcatcaccaattttaaaatataatggtacttctagtgaatatgacttgaagattaattctttatatttggaagtacatttttctcaggacatcaaacttgttacctaaaattaatgcttttgtctggaagattggtatcaagtaactaatagattttcataaagaagtgatctttctagtgccatagtttattttgggtaaaagttatatttgttcatttcaatgtatttatatgattagtagattcgcaaatgaatctttcgatatattcaataatggttaattaaatatcttgtttttggttgtaccttattttatgtgagatatatatatatatgtatagtttttgaaaagttgtgttcatgtcagcagtttataaatcacatatttaaaataacatttttaatgcatagtttttattacctcgttattccttgttataaactaataattcttgcagtgttcacttgaatttagttttaggaaaaaagttttttgcagatcaacttgtatttcctggaagaaaatttcctattttacctcagcttcctatttaatgtattatttatttatttacttaacatttatttgttttttatttcacctgaactgttagtaaacttagtaaaatttggtgcctacatgtggtaactgtcctgtcccttatactcagaaacgttttccacctttgtgtcctttaggtcattgttgtgttatattccatttattttattttgtccattgttctctcagaaattgagggtcatacattttaagaaaacaatgatatgctatttaagagaatgtatcataaattgatttgtaaggaaaagtatccccattcttcatgtatgtattttactctaaaatgttgaagaatcatatagaagttagctatgaaaacaatgtggtagagaaagtatggatcgatgccacttaaatgttaggaagaagctcttagagcattatctgtttagctaactgcaaaacatagcagacatgtggattttttaatagtcatcaaggatctaacttataatatacactggtagaattgcttagggggatgtctgtggttttctggacttttgttcttctatatagacctgtatcagttgacttatcattcataccacacacccttagctaatcagaactaccttgtccatttatatcttagactattgtcttttttcatagtcacacacagagaaaacttgaatatatggcctgtgttcctttttggctgctcaattccttgagatgaaatatgggtatgggttgctttggcaattacttctttgccgttaaccagtcattcagttttattgagtctttacagcataccagaggctgctagttactagtgatatagtgggcaactatgttctggttctcaagaatattcatagtcaataataagcataacatagtgataatatgatacttagggagatacataaggtcatattctggcatactctggagagagataccgtaatcagccttgaggtgcaggatgtgatctgtaaactgagacctgaagtatagttagactggtaagaggaatgaggatatatatggtggttaataaaagaacattctgggtagaagatatagcatttgctaagacctagaggtaagagatgttatggagtatttaggaaactacagttattcattttgactgaaatataagtgaaaatagctttcatagagtccttactatgtgccaggcacttcatatgcattaattcattattgcttatttgatacttgtcatatgagatagttgtcatttctgccatgatacagatgaagaaatggagacacagaaagagtaattgcccatggttgcacagcttataaatggtaaaggtaggatttgaaaacagtcttactcaagagtctgtgctatcttgccttcccagttttattttttatgatcctctggagagataagcaagggccagttcctaatgaatttggttcttttcctgaaaggagccagtgaagagttttgagcacaggatatcatgatcagatctatactttaaaagtttactgtactttgtagagagtggattgaaaagggccaagactagtaaggaaacatttgtgttaattcagggaagtgctaatgatggcatttgcctgagaaagacaagtgtgagagaagtagatgtaattggatgtggtgaatgtaattggttgttggaggagagggaggatggagagtctgcctaattttgtgggttgggccactaaataggtagatagtgccattcattaaggaggaacacaagaggaatttggaaagcttgagattatttcagttttgtagatgttgagtttgaggttcttctgggcatattcaaaaagggtatctgtggatatggaattcacaagagaccctgtacagatgatgaggatttatgaatcatcaatgtagacattattgaagccagagaagtgattgtaaggcacgtctctgagaaatgtctaataaagcaatgaaataggaagagtgcttcaaggaaaagctcaagaaaggagaaacagagtgtgatgtttgagaagacaagggaaaaaaacattaatagcattaaatgctttagcattaagttcttggcttctcttcttgtaaaaatttcccaattcagaacacagtgggattattaactttcaattgataataataatgataggcaaacttctaaaatttgtattgtagtttgcattttattataaactttctttaaatttttattttgaaaaatgtcatatcttcataaagattgtaagaaacacactgttggtgttaatgtaaattagttcaaccattgtgggagacagtgtggcaattcctcgaagatctagaagcagaaataccacttgacccagcaatcccattactgggtatatacccaaaagaatataaatcattttcttataaagatacttgcacacatatgttcattgcagcactattcacaatagcaaagacatggaatcaacccaaatgctcatcaatgatagactggataatgaaaatgtggaacatatacatcatagaatactatgcagccatcaaaagagaatgagaggtcaagcgtggtgactcatgcctacagtcccagcactttgggaggccgaggcaggcagatcacttgaggtcaggagttcaagaccagcctggccagtatggtgaaaccccatctctacaaaaacaaaacaaaacaaacaaaaattaactggtcatggtactgtatgcctgcagtcccagctacttgggaggctgaggcaggagaatgacttgaacccagaaggcagaggttgcagtgagctgagatcgcaccactggactctagccttagcaacaaaactagagtttgtctcaaaaaaaaaaaaaaaaaaaaaccggaacaagatcatgtcctttgcagggacatgggatggaggtggaagccattatcctcagcaaactcacacaggaacagaaaaccaaacactgcatgttctcacttataagtgggagctgaacaatgagaacacatggacacatggtggggaacaacacacactgggacccgtcaaggggtcggggtgggagaacatcaggaagaatagctaatggatgctgggcttaatatctaggttatgggttgatctgtgcagcaagccaccattgtacacatttacctaagtaacaaacctgcacatcttacacatgtaccccagaacttaaaagttgatgggaaaaagaaaaacaataaccacccacatacccttcatatagattcaccagttcttaatgttgtgccaactttgctttatctttttgtcagtatttttacacacacatgtatttctctgtctcttgtttgttcaatcacattttttgctgagtcatttaagagctaattgcagatatgatactttgcacttaaatatttcagcttgtctgtttgaaaaagaaagatgttctcctacaatgaacacaatataattgtcatgctcaggaattttaatattgattcaacaccattatctagtccataatgagatttcttctaatggcccaataatatccttcagtctccccacctccaatatccaaagttctgtcaaggatcacatactacatttggttctttattatagactttttaaatatcgttgtataccattgtgattctatcgtctcctttaataaagaggagaaccagaaaaatgaaaggtcataagaggaatgaggtttggagaataggtgaaaaaaggcatcataatgtttataataatgtttgcctgttcagagaaacaagaatcacagataaagtcacttatatgtagataagagaatgctgtattactttttgctattctattcactgatcatttttctaagaactctgtatgcttcttgtttaactcttatgtcagcatgtatgagaaaactgagttaaagagatgttaagtaactcattcatgctttactagaaattggttgatgagggacataaacctaggccggtgtgattttagattgcttcttttaaccattgtgttgtattgccttatatttctaagtaatttatgttcactgagagcaaataatagtctagctatgacttagaaaagtaaaataaagatgttgggcagaaaaccattttattaggggtttttttggaggagcagattaatttgtttctgtattctttggttagtttgtgtgtgtgttctttttaattctttaaaatgaaactgtttaatccttaaatccttaagttttgaaaattttggcctattatttatgtgttaggttgatattaaatccttaatagctttaacattttctactttgttagagaggatttaaaatttaagtagataagctgaatatctggctttatattaaattactgctgatggccaggcacagtggctcatgtctgaaatcctagcactttgggaggttgaggcagatggatcacttgaggccaggagttcaagaccagcctggctaacacagtgaaaccccgtctctactaaaaatacaaaaattagccagttatggtaatgcatgccagtaattccagctactcggtaggctgaggtgggagaattgcttgaaccgggaggcagaggttgcagtgagccgagatcgcaccactgtactccagcctaggcgacaaagactttgtctcaaaaaaaaaaaaaattactgctgaattttatcttcttcttatttattttttttttttactattttagttggctcttcgaaatgaggaggcagaaaatgaaaacagcaaattaagaagagaggtaaaaaattttagtagttgtggtggttcaacaaaggtacttattaaaataagtacctaagtttacataaatttatattttaaccaggactggagtcttctaagtaactgatgttttcagactgattttatggtatgactttgtctcagggaaatagaaaacaaagcaaaatgtgaggccattaagtattacattcatctcaggtctatgcgggtaaatctttttttgttgttttataagccattctttgctagttttctaattgaatagatgactggatttctattcttatttctcttacccagaatcctttaaaattttttgttacttgtggaatcttataaattctgattatcatttggttctactgagccaaataatgtttgtacattgtttattctgatagaagttcttaagtttctaacataattgaaatattatttgttttggtagataattagtattctttctttggttattcaagataatatgcatcattttcccaaaatttttttgttttctttagtttctgattattatttttaattatgtattacctttctcatttctaattaccgttttcctgtccttttctgtagaacaaacgtctaaagaaaaaggtgaggctttaagtgtggtgaaatcttgggaatttaaaatatgttgtgagagcactatttagaggatatgattttgttattctgaatagttttgtaattgaatgttgtgtttggttaccttcagaatgaacaactttgtcaggatattattgactaccagaaacaaatagattcacagaaagaaacacttttatcaagaagaggggaagacagtgactaccgatcacagttgtctaaaaaaaactatgagcttatccaatatcttgatgaaattcaggtaaaatggctagaagtcaattcagagcaatggttcctaaaaactttaatttcattacaatgtaaatataatatttagccctacatgtaaattccctggtataaatctgtcactatgtacttgtaaaatgtgaaataaattacatctttgaagttgcaactttttagccatttttatatttgcctgtcttggtcattaagaacaattgaggtccttatgtactattttcttgattcaatttgatttaattggtcaatgccaattagtaaaggtctataaagaattctctttttttctagaggacacttatggctgcgtttaattttaatttggtttaaatttcagtttttttaaaattactttttaattatagtgtctttaacttttttagactttaacagaagctaatgagaaaattgaagttcagaatcaagaaatgagaaaaaatttagaagagtctgtacaggaaatggagaagatgactgatgaatataatagaatgaaagctattgtgcatcagacagataatgtaatagatcagttaaaaaaagaaaacgatcattatcaacttcaagtaagaattacttttagaataacttatttattcagacttcatattatctcattactatttatttgacactagaaagtactttttctaggatgtgaatttttgtctgtctttttaatagtgtaatatcttgtcatgttggtatatttgtccatatgtgtttctccaatcacctcacaaacactaatttttgcaatttaggatatataaatgatacttgaatgaatgtgtagatagcagtcattatggggttttctataaaagactactgaaaatcctgtggatcataacatttcattttatcttaaaataaatacattataaatgtattagaaaccaatacattgttcagtatttatgtggattaaatttgtttaaaaggtagaataatgtttaaaaataaaattttctagtaatgaaagataattatgcaattataagatgcagaaactattaaatgtcacctataattccaggatgacttcaatgataaatacacatatgtaatgtaatgtatccgtatgtatgtgtatataagtatgaatacgtatgtgtgtgtatgtagatatatttatatatataatgtatatgtaaatatgcacaggtgtaaatatatgttacatcagtttgcaacaactcttgaaataactttgtcttttaggtgcaggagcttacagatcttctgaaatcaaaaaatgaagaagatgatccaattatggtagctgtcaatgcaaaagtagaagaatggaaggtattttttttcaattgacataataactttttctttttgtattttagatttaaattttagtcttatttttctttaaatgtcttatactggtttataacacgtttattagggtttttaaacataagtttattttatttattggttagaaaagctctagaactgtcctttttgatctctagctaatttgttattgaatgacctctttcacatcaatgagtttaactttaaactttttgatagaagtctaactccaaaatatatttggcatctaaaatatataattcgaaatataatttaaatttttttacttaactcatagttaccttatatacattagttaaatagttgcaggtttaattttagtttttctaactaaatgtcaggttcatcagtgggaatgggaataagcaaagggatcagaataacttgggaagccttttcaaaatacacttttcttcctcaccaccactctccaaccttaaccaaattgtcaggccttaccatattagaagctgggattatgatggttgtatacttgaaaaacatcagagattattctgaatgaataattctaattttaaaaactatcacttctagagtcattgctttctagtatggttcacataaatcttgtgggcagtttggaactggttagcatctagggagctcagataacctatattttaaacaaaagcattagcaatggaaataaggcctatagaatcagtcatgtctccataaactttatataaagggccagacagtgaatattttagaccacctggtctctgctataactaaactctgcttatagcatgaaagcagccattgacaatacgtaaatgagtgagcaaggtggttttccggtaaaattttatttacaaaagcagatgggaggccagatttgacctttgggccatagtctaccaacccctggaaaaaacagttgtctttaccagattgaatgttggcagggtaaatggtgacatgttatatgtattctgtactttgttttgacttaataccatttcataattattttatatcagtacgtatagtattgctgttctttttaaaggctatgtaatttttctttttatacaggtgttaatttgataatttgtgaagtttatgaagtttccaattttggggttgtaaactgttttaatgaatatccttatatatgttattttgcaaatgtacaagtatatctgtggaataaattgctgcaagtgttgtaattgtcatgtatgttgcaaatacattctaacagtttgtcactttttttgctttatggcattttttgctgtgaaatatttctttttatgcttagttaaatttattattttttaatgacttttgacatttgttataatgagaaaggcttctgagtataaacttgttttctcatcttttctcctaatatcttgttttgtttttgtttttgtttttgtttttgagacagagtctcactcagttgcttaggctggagtgcaatggtacaatctcagctcactgcaaatgccacctcctgggttcaggtggttcttgtgcctcagcctcctgagtagctgggattacaggcatgtgccgccatgcgcagctaatttttgtagttttagtagacatggggtcacactgtgttggccaggctggtcttgaacccctggcctcaagtgatcctcctgcctgggcctcccaaagtgctggaattacaggtgtgactctgcctggcctttttttacatttaaatcttcgaaacatataattcattttgatgtaaggagtatcatgtggattcaacagagctactctgttgtccaaacatcttttattgattatttcatcttttattgaattgattgatctattttctagcagtgtatacttgttttaatttgtgtatgttttaatatctaaaaacgttattatttttctgcttttagacttctttatgaatatttttaatgtgaattatagaactggcttgtccagttcttaaaaaatatcttgtggatttttattgggtatgtgttaaagttataaattgttttatagattgatttaggataaacctttttatgttatttggtccttctagctaaagaacacaagataccttttctttcattcattcaagatattttatgcctcttggttgcattttaatgcatacttcataaagatcaattgtataaaacttttcacagttgtatggaagtacttcttgtttataaatgagttttgaaaggttgaaatatttttaaagattgaattataaaaaaagaaaattcggtatatattttaaaatcattttctatttgaatttcaggttgtatatacaaaaggaacagagattatgccagtagttgctcatactttctcatttcaaataatttttattttctgtatcataaatctactaacggtgtttattatttatgataatgaagaatgttttattaactttccttttgcataacagattctattgtgtttatttctagctaattttgtcttctaaagatgatgaaattattgagtatcagcaaatgttacataacctaagggagaaacttaagaatgctcagcttgatgctgataaaagtaatgttatggctctacagcaggtaaaatcttaacagaattttgtttatcaaccagttttattacagttggaactctgaacgatgtcttttatttattatatcatcagtgcctagtgtagcggctggtactaccaagtgtataataatgtcttttgaaatttcttctaccacctggtcccaataaaaaattagaattaagtttagatcacggattagacttagaactagagttactgtgtttatttttctatgtttatgtggatagtacacacattgttttggttagaaattatttaacaagaaatgattaaaaacttttagaaatttaaaataattttatactcttttaaggtttattttactgtatcttagtcctaacataccctatacaatgtgaaataagctaaaagcatggttataatttgactgtgctacctattttatttttagtgaaaataacccaaataaaaggaagtaatacttttattatttgtgctgtagttatagtccacaagtaagaagatgatttgaaaagtgtatgctgaataagaacaattacaggggacaacattttttaataaagtacgaaaggggaaaaagctaagttgaataaaagagaaagcacagagcaaaacagaaacatacaaaatggtaaaaaggtggaattgaatggaggatgaggaaagtaacatataaggaagtatagaagccataaacattagggagttctggaaatcctattttccagagtgttagccattatatccatctttcagtattggagtaacagcagtgtacctatcattgtgtattacagttgaagtgtacaaaatggtaaaaggcatacttgtacccacaagaaaatatgttctacagtcttgttgaaaaaaatcagacgtacttttttccttacctttttaggttaatattcatgaagggatatatattgttttaaaatattttatagggtatacaggaacgagacagtcaaattaagatgctcaccgaacaagtagaacaatatacaaaagaaatggaaaagaatacttgtattattgaagatttgaaaaatgagctccaaagaaacaaaggtatttttataaatatatagttattttatatacaattatgtttttaacgactttatttttattaaaataaaatgtcaagtcaatattgagttttctccatttgaattttatattttcaaaaaattgtacaagatatttattattatacttatattactagtgcttacatttgtaaatgatggatgcattttctattatttttctcctctggtgaaaattacattaacgtttattaccaggtcactggtatgaaagaaatgaaaaattgtgatacaattatttttatttaactttttataattaacaaagaatggaagataataaaattttgaccagtgtaacagcattgcagatagttttcagaggtaatttcacattaatcttacccaaattaatgtttcatcatattctccttaccctgagccatattaccttttttaacacatcaaattctatgaatataagttcttacaatatctgtgttgttatatttccatagcactacatactatagttatgccagggcacactagtgcgaactgttcatgggaaattcatggacatgtttattataattggtgactatgtatatatgtatacactacatttatacacacgcgcatggaatcactatttcttcttcatgtcatatatatatacatatatacacatatatatacatgtcatatgtgtgtgtgtatatatatatatttgtatatatgacatgaagaagaaatagtgattccgtgcacatatgtgtgtgtaagtgtagtgatgtgtttgcaggtacggttgtaatttcaaaaatgaagcaaaagccttgctcaggagataattgaaccaatacttaaaggaagtaaaggagtgaaacatgcagatggctctaagcagtgggaataagttcaaaggcagtaaagcaggagtgtaccaatcatgtctgagaacaacaaagaagtctttttggctggagtagagtcagcaagtgaggcagtgataagaccagagaggtaaacagaggccatatcatatggggccttatagttcattgtgcagacttggcttttaagtgagaagggacaccggggaaagtttctgaagatagaaatgatataatttgacttaggctgtgtttgcagtagactgtaggagtggtaaataagaatcagggagacctgttagaagactattgcaataatctggagaaaagtgatggtggtttggggcatggtggtagcagtggagttactggatgcagcagttctggatgtattttgaaagtgataaaaatggaatttgctaacagatcagatgtaggatgtgagagagagagaactcttggtctgaaccaaaagttttggtcatggtggggttgtgggaagagcaggttgagagataatcaggtacttaattttagacatgttaggtttgagatgcttattagacattcaagtgaaggtgttaagtaggcacttgtatataaaagtttaaggtttaggacaacaatctaggctaaagatatgtttggtaactgtctctgtaaaagtaattgaaataatgaggctggctaagatcaccaagggagtaaatgtaggttaagaagaaaaatctaaagagcttctactttagcagctggggagataaaaaggagctaccaaaggagactgaaaaggaaagcccagagagctaggaggaaaagcaggagtatggagagccctgaaaaccacatgaggaatgtaaccaaggaagaagaaacaactgctttcagagctgtgttcattgctgctgataggtcaagatgatcactaaaagttgactattggacttagcaatggtcatttttggttcaagagaaaatgggtagagaggaaatgtaataaagaaatataggaacccttttccaggactgtttctataaagagaaggagaaaacaaggtggtagcttgaggggaaagagggattaagaaaacatttttctctttaagatggaagaaataactcatgattttaggttaataggagagctccattaaagaagaaacattaatgaatcaatgaagtggagagagagaacttctggaacaataatatttttaagaatgcaatgggatgggatcctagtgtgccagtgaagaggttggccttaactaggaacacagagttcatccataattgtagaaaagaaggtagagtgtatagatatcgatgtaggtggcttggtagacatcctggtaatgggaatttgtggaagttctaaactggttgctgcttttttctcagtgaacaagggagcaaggttcttagctgaaggtgaggataggagaagatgtttcataagtttgaggagaaagaagagaagtgaaagtataaaatggtcatctgaaagattgaagacgtggagaatgtggtatgactgttgagtaacttcaagagcccacgatatatatatgtatttctatttatgtgtttattatatttgtatcagaacactttgaaagtagtttaaactgctttaaaaggatgactaatagtatggattgtgcgtattctaattactaggagaaaaagtggcaattgatctctgctgtcaaataaggaaaaggacttatctgataacactttagtcagtccgtagttatataatccctaaagctcacagaaggtgtgtgtactagactgtactctacatcttgaacttaacttgtaaaacgtaatggctaatggtattcttccttcataagattaggattaggtttagttatcaggaacagagagctgaagaataatggcaaaatcaagatagacatttatttctcatctatgtaatggcctagaattaagcattccagggtgttgccttcatctgccccatccaaaatggatggaatgcagctttatctcatgtctgtgtcccaaacagcaagacagaggaagaggggcaagagttaaaagcatgtgctgaaggataggcaggtaaatatagtgtttattgtgtagggccatgtggaagaatgataggagaatagatatgtggatggaagggagaatagatactgggggacaactcagcctgtgtcatgttccacagcttagatgttagctccagacagctgtgctcatttcttaaaaacttttgtgatctcaaacgtactagttttatgcctaagtccaatattaaatatataacctatatattagtaaatgcttataatgaatgagtgtgagaatgatctgtcaatcaattttggaatgatagcaatattatgttttggtcttttaacaatttagtaagatattacaagtaggcatttaggaagtttttagcttagtttggattaaatttagctgcaagtgacagaaaaatcaagcataatacaataatttaaacaagatagaaatttatttctctataatatagacaaagttgaagcaactagggcaggatttgtgtgacagatgctcaaatatcccctatcaggaaccctgtctcttgttgctgtgcctatctcaacatgtggtttctaactcatgtgaagttgccaccctcatatccatgtggatttcagctagcaggaaggaggaaagagaagagagattactcctttattttaaaaacatttttttttttttttttgaaattcacatatgaactttgcgtttatattccattactgacatgaccacacatagctgcttgtgtgtaagtggaaatttagttctttatttcaaatggccacgtgtcaagctaaaaatccatagttttagtacagtggacaaaagggaggttaaatattaggaacagctagcagtctgtatcacaatgatcattttttgtaaagcagtattttgcaaccttttaaaatccataccccttcagctaagaaggttttactgaacttcagttttttagtaaattgtattagtaaaaccaaaacaaaactttcatcttacaaatataaaatgacaactttaaaggatttttttttaatggcataccacttttcttgccaccatgttgggatcactgatttgaaggaataagtagtcaattcaattcatgatttttgtttttactctgtaggtgcttcaaccctttctcaacagactcatatgaaaattcagtcaacgttagacattttaaaagagaaaactaaagaggctgagagaacagctgaactggctgaggctgatgctagggaaaaggataaagaattagttgaggctctgaagaggttaaaagattatgaatcggtatgtatttttatcttgtcattcaaggagcttagaattattcttgccattcacagactattctgtgctatttactgcataccatttaaaaaacattccataagtatcttttgataaagattatcctcattaatttatactaaactattgaaacctttgagcatttactttttgccagaattgttttcaaacttttgatcacagtgatttgtccaaataatcagttttggtgaagcagcaggattacttttttttattatctgtgttcattgggccaccatgtagatgtgacaccactggccaatttgacagaatttatgacaggaacatactgtgtcaatacaacctgctctccactttttatactttttcattggttacaactaattcaagcaactaatgacttacttattctactggtattgctgatttgcttttactaattcttttagtattttggtaagtgttttttatatgtaatgcatattcagagtcactttgcctttaggatattatactggaaagttttaactgttgcatattacatcattattattactggatttggtttataaaagcacaataaaaaaccagtgtaatgatataaattataggcatatgtacattttcctttagacttagtaaaaaaaaaatcatgaacttgataaatttattcaagtaaaccatgttatattttaaattaaattggatatttttcagggagtatatggtttagaagatgctgtcgttgaaataaagaattgtaaaaaccaaattaaaataagagatcgagagattgaaatattaacaaaggaaatcaataaacttgaattgaagatcagtgatttccttgatgaaaatgaggcacttagagagcgtgtgggtaagccatgttttaagttacatagtttgcgcaacctgatttacaagtctttttttttaatttaaattttgtttattattatttattaagtagtttaatgcttttttcaaatgcttttataaaacatttaatacaaataaaagtggagctaacctgattgaagtggaatcagattttatggggttggagtggtgggtgggcagggctggaacattgctttatttggtctagcatctcctcagtaatagctgcttgtttaaaaagatgaaagtttattaataccacatatcagagattaacctttttttttcccaacaaaagtagggtctgtattacccatgtttgtttgcaaaatgctcttgtaacagatgagatatttaaacttcttgctctgtgttgtgattctcctgcctctgcctcctgagtagctgggattacaggtgtgcaccactatgcccggctaatttttgtatttttggtagagatgggatttcaccatgttggctaggctggtctccaactcctgaccttaagtgatccacccgccttggcctcccaaagtgctgggataataggcatgagccaccgcgcctggcctgttaaaatcttttaaagatttttaagtacttgatttttataatttagactacttacgttttactttgttcgagtattttaaggagtaattagtaatatagcttgagagtttatatatttattttaataaatagcctattagttaatattactaatttgagtgttatgatagtgcagactaagttgctgctttaaaatgaaaataaatatctaaatatcaatttcattattgctaaatttcatttaatgctttcttagttaaaaatgatcatttgtaaaaactattatctaaagaaaagacaaatagacaaataagtattttatacagatatatatgtgtgaaaagtatctaacttggatccgtagttgtgctaggaccccaaattagacttctgatcaacttggactatcagatcacagccttctgatcaacttggactatcagatcacagccaagaatctggaagttcctaaagatgacttctggcccgtctaggtagctgtcatagacatcatattttctgtgcttaaaaagctccaaatcttggtttataatttcatttaggtttttgttaggatttccattaataattgtgataaaattttaacttgggttacagtttaaatatctggaaaattctttcacagaaagttacctcattcttcagtgatactggctaagtgaattataaccagttgcttgatggtatatgacatttttgcagcttatttgaatgtttttaagtttttaattatattgctttctattgtaggccttgaaccaaagacaatgattgatttaactgaatttagaaatagcaaacacttaaaacagcagcagtacagagctgaaaaccagattcttttgaaagaggcaagtgtggtagtcagttgattattttcttggctgaactatagagaaatactaataatttatactttgcagattgaaagtctagaggaagaacgacttgatctgaaaaaaaaaattcgtcaaatggctcaagaaagaggaaaaagaagtgcaacttcaggtatactcagttattctaaacctttaaaaagaattattgataagtgagttgtctggatatgaaattatttgtgtcttagctgtttttgctgttctattgtggatctgctacaaatttaataaatgacaataataacctgaaggagataagtgagtgtcagtgggttcagtcctgaatctgaaatagacaaaaacaaaacaaaacaaaataacaaaaaccaagcaaacaaaaaagaaaaaaaccttagaattatggaatttttgaaaagttttatagtatagtattttaatttctagacagcaccaatatgttgttattaataataataaaacttagtagtttttatgttaatatatgttactcaacattttccctttccttaaggactatgcattgaaaagcttttcttgtaagttattattattattattattattaatatttgagatggagtctgtcttgttctattgcccaggctggagtgcactggtgcgatcttgctcattgcaacctccgcctcccgggttctagtgattcttgtgcttcagcctcctgagtagttgagactacaggcgtgagccaccacgcctgacttatttttgtatttttagtagaaacagggtttcaccatgttggcccaggctggtcttgaactcctgacctcaagtgatccatccactttggctccccaaagtgctggaattataggcgtgagccaccatgcctggccttaaattattcttttctaagtgaaagtaatgttttattgaatataaattaacatctttcttgggtttattttacttgagctaaagagaacagttggttaagttttataatagccattgcagtgcttttttgtaagaagaccacacagaaggactgtctttttcacttgccccaaatccccaagcacgtatatgagtaatagcagagtggttctttttagcattatgatttctataatacatccaaaactttctcaagaaaaaacttcatgatttattagtacaataatcagtttactcattactcatcatttatatttactttatatgtcttttaactggtgcttattaagtagcactttaatatagaataggcaaagaatggtagagaagatgaaattcaaaaattaggttctcacattattaatagttcattaaaagtgagctaaatgagaagcttgtattggctatgtagaattttggagggattttggaaacaattattctacctttgcattaaaacttgattgtaggttttaagaattaaagtgttggaatagtaggagggttattttaatgtttttagtttgttaattctcttatatataggattaaccactgaggacctgaacctaactgaaaacatttctcaaggagatagaataagtgaaagaaaattggatttattgagcctcaaaaatatgagtgaagcacaatcaaaggtaatagtaaagtattgcaaagagagtaaaggaaaatatttttttttttttttttttttgagacggagtctcgctctgtctcccaggctggagtgcagtggcgcgatctcggctcactgcaagctccgcctcccgggttcatgccattctcctgcctcagcctcccaagtagctgggactacaggcgcccgccaccacgcccggctaattttttgtatttttagtagagacggggtttcaccgttttagccgggatggtctcgatcttctgacctcgtgatccgcccgcctcggcctcccaaagtgctgggattacaggcgtgagccaccgcgcccggccaggaaaatatttttattgtgttttcatttcttccccctttatctcattcttgaacatctaatcttattattgttgttaaataagtagagggaaatatttgcttatttaacctgttgattcaaagattgattaatgagacattatttactctgaatacagattaggagttcagataaagcagagctgctgcataggagatcatcattcaataccccacagtcagatcagaatgagacagaagagaatatgaccataggatcattatcaagaatgttatctgaaattcaccatagtgtagaaagtggaatgcatccttttgtccctttaactagactttcttcatccatgcaagttaaagagaattcaactccagaaactattacaataagagagatttttaaagcaccatgtctgcagtcttcaagaaatctagaatcgttagtcagcacctttagtagggaaagccatgaagaaataaatgacatatgccttttttctgatgactgtatgaagaaggtgtcaagaagccatcaagcactagagaagactagttttgtacaaaaaagcaattcatcttttcatggcttatcaacagcttcagacataatgcagaagttatcacttaggcaaaaatctgcaatattttgtcaacaaattcatgaaaatagagctgacatggataaatcacaagtagcaacattagaagaagaacaggttcattcccaagtaaagtatgctgatatcaatttgaaagaagatataataaaaagtgaagtacccttacagacagagatattgaaaaataagcttaaggttaatcttccagaccctgtgtctattactgcacaatcaaaattatctcagataaattctcttgaaaatcttatagaacagttacggagagagctagtatttcttagatctcaggtgagtttttctccaaattatatttctgtggttgttcttttatgacgtctctaacaaagttctgtaacaattatagttagaatatttttgtttgcactttaacatcagttatacacattgtactttttaaaatctaaaatgcagtacattgatatgaactcattgacttgtctaatttattaaatttttctttagaatgaaatcatagcacaggaattcttgatcaaagaagcagagtgtagaaatgcagatatagagcttgaacatcacagaagccaggcagaacaggtagtgtaaaggcagaacattaaaagagatgattgtggtactaaagacaaaaaccgttatatctttttgcctcttaccatggatgttgggagagggagaaagtgggattaagatcaccatctgctttactgtttagattttagtttatttttatgattgctgctatgtcttcatagctcgttttttttgttttgttttgttatacttaattgatcaaacttttcttaacttgaaaattatagacttgtgatattttgttgaaaaaaatcaattttattctctctgcttttttcagaatgaatttctttcaagagaactaattgaaaaagaaagagatttagaaaggagtaggacagtgatagccaaatttcagaataaatgtaagttacaattatcttttacttttctgttcttatttttcctatacttaaaatcatgggcctaaaagggcgttaacacattctctgttttctaatctgctttactcctaattacctctgtactgtatatacttcagtctgtcactatccagttgatttgccttgctgttttcattgtgagagaatgttactaatatgaattttttgtgagaatatataactcctttttcttgtgtgttcttcaatcaaaatgaagttagaacaccaaatttaaaatactttaatataaagcatagtttaagttaaggcagaagtatgccttatatacgtgtgtatatgcacgtgatataaataggtctgtcatttaactcaactattcacgttggatttatagttgaatttttttgtatgtttatttacatttggatttttccaatgatgtctttggtatatgtgaaatatttgtcatctgtatagcatagtgtaaattgtgaaaaagatctgatcatccaatgagaaaactgtgtaattacagtaaaagaattagttgaagaaaataagcaacttgaagaaggtatgaaagaaatattgcaagcaattaaggaaatgcagaaagatcctgatgttaaaggaggagaaacatctctaattatccctagccttgaaagactagttaatgtaagttatttttttcatgttaatgtttttcccctatcactttagagagattttctgctgtgtacagatctccatagtttctgatgagatatttttagtcatttgaatcattgtttccctgtatgtaaagtgtagtttttcttgagctgctttcaatacttttcttctaccaattggataattgttattaatctgtcttcaagttcactgacattttcctctttatctgtgttcttttggttcaagggtcagcttgagaccttgaggagttttttacaccgactttggagctcgtttttgctgactcttttcttattgggattttcctttcacttatcccatggctttgggctgtatcctgtggttttctagatgagaaagatgatagatctctgcaattgcaccctgccctatgactaaatctttaaaaatggcaaagtcaatctttgctggtcctgtcttccgtatttgaggggttttttcccaaaatctgcttgcttttgttcattttctagaacatctaggtagttttttttcattcattttttatttatgggagtgtagatctcttaggaacttatgccatcagaagtattatgaaatggctttattctaaatgtttaaagatttactcattgctacaagaaagatttagccatcactaatattctatatatatttaccatatagggacttgagaatttcacaggattcagtatctgtatataaacttgaataatatacacattttagattgttaatatttaagtatatgtcatttatgttatctgaacatatttagcgtacattgtcatattatttcccaaatttgtgcttgatttcaaatgggaaaaaaattcttattatttattgaattgtttttttaaaaaaatcatgattaatcagtaattggatactttttaaaataacactataattgttaacagagaatgagagtgatactggtatgttaaaaacttcctgaggcaagaaaataatttgattcccattatatctttctcatactgactttccttctctgattggtgattttgttttgcctctgccactttgaatgtctaaaatgattctttatgctttttttatgtgaacatcttttgtccgtgatgatgcccactactgatactgtgtcccagatcaaacttaattttccaagggcagctctacttagtgaccaaatgaaaacacagtgaatagcccaagaaatcctaacttctatttatgttgacaatctctggaccttcctgaagccactgtttgcatagacttcatttacttttatccgggattgtcattgttttttcagattcataggccctatctgaaattcacaaatcacctagcaatacttctctaagaaatcttcagaatccatgacaatttagaccagacaatgctggattatgcacttcagttcactttttgttactacaaggtatttttcagtgcccccaacagctatcttaactcattctcattttaccaaagtccatgtagacacggcactattcctcaatgagacaactaactagaccaccttgttgtcagtcagagtaccttcctctacctacttttatcttccttatatcctctttgagttagtataagttattactctgcatgacctgctctaatctccttcaggggaaggcttttacaaatctactacctagagttaaaccccagatcaccttcctgagtaggagattgcatttggttctattcattttaccttatttggcttctaccttcactttttaagacttactttgcctttaacagttttttccatacagttcatctaaagtccaaatatatttattagatgtgtgcattgtgtgtatatacttagatatgccactgttggagatttcgggccagtgatgccactctgataatattttaatatttgacatattatttttgcttactcattattcttagataatatcatgttatgataccttgcctttatttttatttatgcttcaactatgtggagaggaagcactgaaaaattcacttaattgaatgttgtattgatcaattgttcaatattgtattccattcctttgcgcatgctttgaatgcaggtgctatataatttcagagaaaaatacctcattttgactgtacaaaaaccccatgtagggagcagagctcacattgttttccccttttagagacaagaaaactaagatacagagaatttaagtcacttgcccagctgttaagtgactgattaaaatttgaaccctggtcatcttattcccgtctggttgtttttctagtctaccagtctattaagattagctaggtgttttttaattgttttaatgaagtaattactatgcttggtaatgtaaatgaaagttttatagattcataaataagaatttgaattggcatactttattatcatgcttggcaatgaaaataggaaaatgcttaaatgtccattttatttaaagacagactgttttttactatgattttactgtttttctccacatttctaatatataatataaatttgctaggctatagaatcaaagaatgcagaaggaatctttgatgcgagtctgcatttgaaagcccaagttgatcagcttaccggaagaaatgaagaattaagacaggagctcagggaatctcggaaagaggctataaattattcacagcagttggcaaaagctaatttaaaggtgagaattttattaaataaaagaaaatgctaaacataagaatgtagatttaataggaaatttttaattttttaaaaagaatgctttatgagaaaatgccccttgaattaattctttcaatattaagaaactggatttctcttataaaattataagtggaaaataagtgccttataagattgaaaagaatacaaaaattctaaatctcatacctaggcatttctaagcagaaactgaagtatggttgaggtaaaattcctggcagggcattcacatatctgtcaatttgtctttctttgggtgtaagagttgtgattctcattgctggatttttttttccagatagaccatcttgaaaaagaaactagtcttttacgacaatcagaaggatcaaatgttgtttttaaaggaattgacttacctgatgggatagcaccatctagtgccagtatcattaattctcagaatgaatatttaatacatttgttacaggtattgaaaattttgttacaggtattgaaaattttacatgtgaataacaaaaatcattggtagtatgtttctttatgtttttatttttattttactttattttaatttttccatcaccaaagcatgcagatagtacttttctcaatatttagtcttcatgtattcctgagttctcaaaatagtaacagtgaaatatattttttatggattttgatgttagatggattataaataaaagcaatttataccattcattccattcatctgcatgagcagcatgttcatacatcttgttcgcacacctgtcattcatgtgaaatatatggttcacaagcagaacaacaagcagctattataaagcagtgttaagtaaatgagcacttttatttcttgctgggtggaaaacaaaagaataaagtctgtcaaggctttttagtgtcatgatagaattgttcccctttttgcattcacaagtaaaaactactttttttttgagacagagcctcactctgtcactcaggctggagtgcagttgcgctatcttggctcactgcaacttccacctcctgagtttaagtgattctcatgcctcagcctcctgagtagctgggactacaggcatgcatccctggctaatttttgtatttttttttagtagagatggtgtgtcgtcatattggccaggctggtctcaaactcctggtctcaagtgattcgcctgccttggcctcccaaggtgctagggttacagacgtgagccactgcacacagccataagcaaaaacttctaaaccaaattattcttcatctttgtcttccctttacgcaataaaatgttaatctaccaccaaagaggaaagggtactctactatactacctgccctgggtttctcagttttgctgtctatataatggtcgttatgaatgtcctaatgacagatccttttcattattttatttgaaatttgactatctataacatcacatacattataaatataattacaaatatatgttcagaatcaatgaaaatatatttttgattatatgggccactatttctctctgctaggtgatccatttgtgagtatacttgagttataattattaagtactcatttttattttggaaattacagtaattcatctttttctcaatattgggatttttattattattttatgttgtctaaggacagccttaactacttattagaatattgctttgtatgtgatattattatttttaaatgtataattttaacattattatttctcttatttacctgaggtataggaacactatcagcaaatattggtagtatggcattgtcgtattttttgagataaaattcatgatttttaatctttgtataagaaatatatcagaagtttgtagtagattagagagtaccaactgggagtctgaaaagctgtccaaagtggcaaaacaggtacttagactctcaatcctaaggctgtatagagctataaacgtggcaagacctttggagtcagacagacccaaactcaaatgttggatccatgtatatggaaagcacctgacaacaagcctagcatatgtacttggtaaaaatgattgccaagtgtagtgttaatgagtttttggatattgagtaagttatttaaatttcaatttcatctttaaaatgaaataattggaaaggataatttgagtgagggtatgaaattatgtgttcataagagagggtatgtggccgagtgactagaggcgagtttataactattctatctaataaaactttgtaatctggtaatttgtgtgctaaaaataactttacctgttgtatagtactctttttttatgccttaaactaaagtgttcaaaatatcatgg

SEQ ID NO: 438 - RNA, 100 nt, synthetic construct
  source 1..100: mol_type = other RNA
gatactcacaattacaacgttttagagctagaaatagcaagttaaaataaggctagtccgttatcaacttgaaaaagtggcaccgagtcggtgctttttt

SEQ ID NO: 439 - RNA, 101 nt, synthetic construct
  source 1..101: mol_type = other RNA
ggatactcacaattacaacgttttagagctagaaatagcaagttaaaataaggctagtccgttatcaacttgaaaaagtggcaccgagtcggtgctttttt

SEQ ID NO: 440 - RNA, 102 nt, synthetic construct
  source 1..102: mol_type = other RNA
gagatactcacaattacaacgttttagagctagaaatagcaagttaaaataaggctagtccgttatcaacttgaaaaagtggcaccgagtcggtgctttttt

SEQ ID NO: 441 - RNA, 103 nt, synthetic construct
  source 1..103: mol_type = other RNA
ggagatactcacaattacaacgttttagagctagaaatagcaagttaaaataaggctagtccgttatcaacttgaaaaagtggcaccgagtcggtgctttttt

SEQ ID NO: 442 - RNA, 104 nt, synthetic construct
  source 1..104: mol_type = other RNA
gtgagatactcacaattacaacgttttagagctagaaatagcaagttaaaataaggctagtccgttatcaacttgaaaaagtggcaccgagtcggtgctttttt

SEQ ID NO: 443 - RNA, 105 nt, synthetic construct
  source 1..105: mol_type = other RNA
gatgagatactcacaattacaacgttttagagctagaaatagcaagttaaaataaggctagtccgttatcaacttgaaaaagtggcaccgagtcggtgctttttt

SEQ ID NO: 444 - RNA, 144 nt, synthetic construct
  source 1..144: mol_type = other RNA
gtatctctgatgagtccgtgaggacgaaacgagtaagctcgtcagatactcacaattacaacgttttagagctagaaatagcaagttaaaataaggctagtccgttatcaacttgaaaaagtggcaccgagtcggtgctttttt

SEQ ID NO: 445 - RNA, 147 nt, synthetic construct
  source 1..147: mol_type = other RNA
gatctcactgatgagtccgtgaggacgaaacgagtaagctcgtctgagatactcacaattacaacgttttagagctagaaatagcaagttaaaataaggctagtccgttatcaacttgaaaaagtggcaccgagtcggtgctttttt

SEQ ID NO: 446 - RNA, 150 nt, synthetic construct
  source 1..150: mol_type = other RNA
gtatctcatctgatgagtccgtgaggacgaaacgagtaagctcgtcatgagatactcacaattacaacgttttagagctagaaatagcaagttaaaataaggctagtccgttatcaacttgaaaaagtggcaccgagtcggtgctttttt

SEQ ID NO: 447 - RNA, 149 nt, synthetic construct
  source 1..149: mol_type = other RNA
gctcatactgatgagtccgtgaggacgaaacgagtaagctcgtctatgagatactcacaattacaacgttttagagctagaaatagcaagttaaaataaggctagtccgttatcaacttgaaaaagtggcaccgagtcggtgctttttt

SEQ ID NO: 448 - RNA, 100 nt, synthetic construct
  source 1..100: mol_type = other RNA
gactcacaattacaactggttttagagctagaaatagcaagttaaaataaggctagtccgttatcaacttgaaaaagtggcaccgagtcggtgctttttt

SEQ ID NO: 449 - RNA, 101 nt, synthetic construct
  source 1..101: mol_type = other RNA
gtactcacaattacaactggttttagagctagaaatagcaagttaaaataaggctagtccgttatcaacttgaaaaagtggcaccgagtcggtgctttttt

SEQ ID NO: 450 - RNA, 102 nt, synthetic construct
  source 1..102: mol_type = other RNA
gatactcacaattacaactggttttagagctagaaatagcaagttaaaataaggctagtccgttatcaacttgaaaaagtggcaccgagtcggtgctttttt

SEQ ID NO: 451 - RNA, 103 nt, synthetic construct
  source 1..103: mol_type = other RNA
ggatactcacaattacaactggttttagagctagaaatagcaagttaaaataaggctagtccgttatcaacttgaaaaagtggcaccgagtcggtgctttttt

SEQ ID NO: 452 - RNA, 104 nt, synthetic construct
  source 1..104: mol_type = other RNA
gagatactcacaattacaactggttttagagctagaaatagcaagttaaaataaggctagtccgttatcaacttgaaaaagtggcaccgagtcggtgctttttt

SEQ ID NO: 453 - RNA, 100 nt, synthetic construct
  source 1..100: mol_type = other RNA
gcaattacaactggggccgttttagagctagaaatagcaagttaaaataaggctagtccgttatcaacttgaaaaagtggcaccgagtcggtgctttttt

SEQ ID NO: 454 - RNA, 101 nt, synthetic construct
  source 1..101: mol_type = other RNA
gacaattacaactggggccgttttagagctagaaatagcaagttaaaataaggctagtccgttatcaacttgaaaaagtggcaccgagtcggtgctttttt

SEQ ID NO: 455 - RNA, 102 nt, synthetic construct
  source 1..102: mol_type = other RNA
gcacaattacaactggggccgttttagagctagaaatagcaagttaaaataaggctagtccgttatcaacttgaaaaagtggcaccgagtcggtgctttttt

SEQ ID NO: 456 - RNA, 103 nt, synthetic construct
  source 1..103: mol_type = other RNA
gtcacaattacaactggggccgttttagagctagaaatagcaagttaaaataaggctagtccgttatcaacttgaaaaagtggcaccgagtcggtgctttttt

SEQ ID NO: 457 - RNA, 104 nt, synthetic construct
  source 1..104: mol_type = other RNA
gctcacaattacaactggggccgttttagagctagaaatagcaagttaaaataaggctagtccgttatcaacttgaaaaagtggcaccgagtcggtgctttttt

SEQ ID NO: 458 - RNA, 105 nt, synthetic construct
  source 1..105: mol_type = other RNA
gactcacaattacaactggggccgttttagagctagaaatagcaagttaaaataaggctagtccgttatcaacttgaaaaagtggcaccgagtcggtgctttttt

SEQ ID NO: 459 - RNA, 17 nt, synthetic construct
  source 1..17: mol_type = other RNA
atactcacaattacaac

SEQ ID NO: 460 - RNA, 18 nt, synthetic construct
  source 1..18: mol_type = other RNA
gatactcacaattacaac

SEQ ID NO: 461 - RNA, 19 nt, synthetic construct
  source 1..19: mol_type = other RNA
agatactcacaattacaac

SEQ ID NO: 462 - RNA, 20 nt, synthetic construct
  source 1..20: mol_type = other RNA
gagatactcacaattacaac

SEQ ID NO: 463 - RNA, 21 nt, synthetic construct
  source 1..21: mol_type = other RNA
tgagatactcacaattacaac

SEQ ID NO: 464 - RNA, 22 nt, synthetic construct
  source 1..22: mol_type = other RNA
atgagatactcacaattacaac

SEQ ID NO: 465 - RNA, 61 nt, synthetic construct
  source 1..61: mol_type = other RNA
tatctctgatgagtccgtgaggacgaaacgagtaagctcgtcagatactcacaattacaac

SEQ ID NO: 466 - RNA, 64 nt, synthetic construct
  source 1..64: mol_type = other RNA
atctcactgatgagtccgtgaggacgaaacgagtaagctcgtctgagatactcacaattacaac

SEQ ID NO: 467 - RNA, 67 nt, synthetic construct
  source 1..67: mol_type = other RNA
tatctcatctgatgagtccgtgaggacgaaacgagtaagctcgtcatgagatactcacaattacaac

SEQ ID NO: 468 - RNA, 66 nt, synthetic construct
  source 1..66: mol_type = other RNA
ctcatactgatgagtccgtgaggacgaaacgagtaagctcgtctatgagatactcacaattacaac

SEQ ID NO: 469 - RNA, 17 nt, synthetic construct
  source 1..17: mol_type = other RNA
actcacaattacaactg

SEQ ID NO: 470 - RNA, 18 nt, synthetic construct
  source 1..18: mol_type = other RNA
tactcacaattacaactg

SEQ ID NO: 471 - RNA, 19 nt, synthetic construct
  source 1..19: mol_type = other RNA
atactcacaattacaactg

SEQ ID NO: 472 - RNA, 20 nt, synthetic construct
  source 1..20: mol_type = other RNA
gatactcacaattacaactg

SEQ ID NO: 473 - RNA, 21 nt, synthetic construct
  source 1..21: mol_type = other RNA
agatactcacaattacaactg

SEQ ID NO: 474 - RNA, 17 nt, synthetic construct
  source 1..17: mol_type = other RNA
caattacaactggggcc

SEQ ID NO: 475 - RNA, 18 nt, synthetic construct
  source 1..18: mol_type = other RNA
acaattacaactggggcc

SEQ ID NO: 476 - RNA, 19 nt, synthetic construct
  source 1..19: mol_type = other RNA
cacaattacaactggggcc

SEQ ID NO: 477 - RNA, 20 nt, synthetic construct
  source 1..20: mol_type = other RNA
tcacaattacaactggggcc

SEQ ID NO: 478 - RNA, 21 nt, synthetic construct
  source 1..21: mol_type = other RNA
ctcacaattacaactggggcc

SEQ ID NO: 479 - RNA, 22 nt, synthetic construct
  source 1..22: mol_type = other RNA
actcacaattacaactggggcc

SEQ ID NO: 480 - DNA, 27 bp, synthetic construct
  source 1..27: mol_type = other DNA
cccagttgtaattgtgagtatctcata

SEQ ID NO: 481 - DNA, 20 bp, synthetic construct
  source 1..20: mol_type = other DNA
atactcacaattacaactgg

SEQ ID NO: 482 - DNA, 20 bp, synthetic construct
  source 1..20: mol_type = other DNA
actcacaattacaactgggg

SEQ ID NO: 483 - DNA, 21 bp, synthetic construct
  source 1..21: mol_type = other DNA
ctcacaattacaactggggcc

SEQ ID NO: 484 - RNA, 82 nt, synthetic construct
  source 1..82: mol_type = other RNA
gttttagagctagaaatagcaagttaaaataaggctagtccgttatcaacttgaaaaagtggcaccgagtcggtgctttttt

SEQ ID NO: 485 - DNA, 1727 bp, Homo sapiens
  source 1..1727: mol_type = other DNA
ggaggctgaggggtggggaaagggcatgggtgtttcatgaggacagagcttccgtttcatgcaatgaaaagagtttggagacggatggtggtgactggactatacacttacacacggtagcgatggtacactttgtattatgtatattttaccacgatctttttaaagtgtcaaaggcaaatggccaaatggttccttgtcctatagctgtagcagccatcggctgttagtgacaaagcccctgagtcaagatgacagcagcccccataactcctaatcggctctcccgcgtggagtcatttaggagtagtcgcattagagacaagtccaacatctaatcttccaccctggccagggccccagctggcagcgagggtgggagactccgggcagagcagagggcgctgacattggggcccggcctggcttgggtccctctggcctttccccaggggccctctttccttggggctttcttgggccgccactgctcccgctcctctccccccatcccaccccctcaccccctcgttcttcatatccttctctagtgctccctccactttcatccacccttctgcaagagtgtgggaccacaaatgagttttcacctggcctggggacacacgtgcccccacaggtgctgagtgactttctaggacagtaatctgctttaggctaaaatgggacttgatcttctgttagccctaatcatcaattagcagagccggtgaaggtgcagaacctaccgcctttccaggcctcctcccacctctgccacctccactctccttcctgggatgtgggggctggcacacgtgtggcccagggcattggtgggattgcactgagctgggtcattagcgtaatcctggacaagggcagacagggcgagcggagggccagctccggggctcaggcaaggctgggggcttcccccagacaccccactcctcctctgctggacccccacttcatagggcacttcgtgttctcaaagggcttccaaatagcatggtggccttggatgcccagggaagcctcagagttgcttatctccctctagacagaaggggaatctcggtcaagagggagaggtcgccctgttcaaggccacccagccagctcatggcggtaatgggacaaggctggccagccatcccaccctcagaagggacccggtggggcaggtgatctcagaggaggctcacttctgggtctcacattcttggatccggttccaggcctcggccctaaatagtctccctgggctttcaagagaaccacatgagaaaggaggattcgggctctgagcagtttcaccacccaccccccagtctgcaaatcctgacccgtgggtccacctgccccaaaggcggacgcaggacagtagaagggaacagagaacacataaacacagagagggccacagcggctcccacagtcaccgccaccttcctggcggggatgggtggggcgtctgagtttggttcccagcaaatccctctgagccgcccttgcgggctcgcctcaggagcaggggagcaagaggtgggaggaggaggtctaagtcccaggcccaattaagagatcaggtagtgtagggtttgggagcttttaaggtgaagaggcccgggctgatcccacaggccagtataaagcgccgtgaccctcaggtgatgcgccagggccggctgccgtcggggacagggctttccatagccatg

SEQ ID NO: 486 - DNA, 1782 bp, synthetic construct
  source 1..1782: mol_type = other DNA
taggaatagaagggtgggtgcaggaggctgaggggtggggaaagggcatgggtgtttcatgaggacagagcttccgtttcatgcaatgaaaagagtttggagacggatggtggtgactggactatacacttacacacggtagcgatggtacactttgtattatgtatattttaccacgatctttttaaagtgtcaaaggcaaatggccaaatggttccttgtcctatagctgtagcagccatcggctgttagtgacaaagcccctgagtcaagatgacagcagcccccataactcctaatcggctctcccgcgtggagtcatttaggagtagtcgcattagagacaagtccaacatctaatcttccaccctggccagggccccagctggcagcgagggtgggagactccgggcagagcagagggcgctgacattggggcccggcctggcttgggtccctctggcctttccccaggggccctctttccttggggctttcttgggccgccactgctcccgctcctctccccccatcccaccccctcaccccctcgttcttcatatccttctctagtgctccctccactttcatccacccttctgcaagagtgtgggaccacaaatgagttttcacctggcctggggacacacgtgcccccacaggtgctgagtgactttctaggacagtaatctgctttaggctaaaatgggacttgatcttctgttagccctaatcatcaattagcagagccggtgaaggtgcagaacctaccgcctttccaggcctcctcccacctctgccacctccactctccttcctgggatgtgggggctggcacacgtgtggcccagggcattggtgggattgcactgagctgggtcattagcgtaatcctggacaagggcagacagggcgagcggagggccagctccggggctcaggcaaggctgggggcttcccccagacaccccactcctcctctgctggacccccacttcatagggcacttcgtgttctcaaagggcttccaaatagcatggtggccttggatgcccagggaagcctcagagttgcttatctccctctagacagaaggggaatctcggtcaagagggagaggtcgccctgttcaaggccacccagccagctcatggcggtaatgggacaaggctggccagccatcccaccctcagaagggacccggtggggcaggtgatctcagaggaggctcacttctgggtctcacattcttgacaggtatttgccactaagcccagctaattgttttttatttagtagaaacggggtttcaccatgttagtcaggctggtcgggaactcctgacctcaggagatctacccgccttggcctcccaaagtgctgggattacaggcgtgtgccactgtgcccagccacttttttttagacagagtcttggtctgttgcccaggctagagttcagtggcgccatctcagctcactgcaacctccgcctcccagattcaagcgattctcctgcctcgacctcccagtagctgggattacaggtttccagcaaatccctctgagccgcccccgggggctcgcctcaggagcaaggaagcaaggggtgggaggaggaggtctaagtcccaggcccaattaagagatcagatggtgtaggatttgggagcttttaaggtgaagaggcccgggctgatcccactggccggtataaagcaccgtgaccctcaggtgacgcaccatctagagctgccgtcggggacagggctttccatagcc

SEQ ID NO: 487 - DNA, 198 bp, synthetic construct
  source 1..198: mol_type = other DNA
gggccccagaagcctggtggttgtttgtccttctcaggggaaaagtgaggcggccccttggaggaaggggccgggcagaatgatctaatcggattccaagcagctcaggggattgtctttttctagcaccttcttgccactcctaagcgtcctccgtgaccccggctgggatttagcctggtgctgtgtcagccccgg

SEQ ID NO: 488 - DNA, 250 bp, synthetic construct
  source 1..250: mol_type = other DNA
gggtttcaccttgttagccaggatggtgtcgatctcctgaactcgtgatccacccgcctcggcctcctaaagtgctgggattacagatgtgagccaccgcacctggccccagttgtaattgtgagtatctcatacctatccctattggcagtgtcttagttttattttttattatctttattgtggcagccattattcctgtctctatctccagtcttacatcctccttactgccacaagaatgatcatt

SEQ ID NO: 489 - DNA, 279 bp, synthetic construct; identical to SEQ ID NO: 403
  source 1..279: mol_type = other DNA

SEQ ID NO: 490 - protein, 93 aa, synthetic construct; identical to SEQ ID NO: 404

SEQ ID NO: 491 - DNA, 282 bp, synthetic construct; identical to SEQ ID NO: 405
  source 1..282: mol_type = other DNA

SEQ ID NO: 492 - protein, 94 aa, synthetic construct; identical to SEQ ID NO: 406

SEQ ID NO: 493 - DNA, 318 bp, synthetic construct; identical to SEQ ID NO: 407
  source 1..318: mol_type = other DNA

SEQ ID NO: 494 - protein, 106 aa, synthetic construct; identical to SEQ ID NO: 408

SEQ ID NO: 495 - DNA, 330 bp, synthetic construct; identical to SEQ ID NO: 409
  source 1..330: mol_type = other DNA

SEQ ID NO: 496 - protein, 110 aa, synthetic construct; identical to SEQ ID NO: 410

SEQ ID NO: 497 - DNA, 105 bp, synthetic construct; identical to SEQ ID NO: 411
  source 1..105: mol_type = other DNA

SEQ ID NO: 498 - protein, 35 aa, synthetic construct; identical to SEQ ID NO: 412

SEQ ID NO: 499 - DNA, 114 bp, synthetic construct; identical to SEQ ID NO: 413
  source 1..114: mol_type = other DNA

SEQ ID NO: 500 - protein, 38 aa, synthetic construct; identical to SEQ ID NO: 414

SEQ ID NO: 501 - DNA, 138 bp, synthetic construct; identical to SEQ ID NO: 415
  source 1..138: mol_type = other DNA

SEQ ID NO: 502 - protein, 46 aa, synthetic construct; identical to SEQ ID NO: 416

SEQ ID NO: 503 - DNA, 123 bp, synthetic construct; identical to SEQ ID NO: 417
  source 1..123: mol_type = other DNA

SEQ ID NO: 504 - protein, 41 aa, synthetic construct; identical to SEQ ID NO: 418

SEQ ID NO: 505 - DNA, 123 bp, synthetic construct; identical to SEQ ID NO: 419
  source 1..123: mol_type = other DNA

SEQ ID NO: 506 - protein, 41 aa, synthetic construct; identical to SEQ ID NO: 420

SEQ ID NO: 507 - DNA, 108 bp, synthetic construct; identical to SEQ ID NO: 421
  source 1..108: mol_type = other DNA

SEQ ID NO: 508 - protein, 36 aa, synthetic construct; identical to SEQ ID NO: 373

SEQ ID NO: 509 - protein, 36 aa, synthetic construct; identical to SEQ ID NO: 423

SEQ ID NO: 510 - protein, 35 aa, synthetic construct; identical to SEQ ID NO: 424

SEQ ID NO: 511 - DNA, 88 bp, synthetic construct
  source 1..88: mol_type = other DNA; note = SaCas9 scaffold sequence
gttttagtactctgtaatgaaaattacagaatctactaaaacaaggcaaaatgccgtgtttatctcgtcaacttgttggcgagatttt

SEQ ID NO: 512 - DNA, 27 bp, synthetic construct
  source 1..27: mol_type = other DNA
cccagttgtaattgtgaatatctcata

SEQ ID NO: 513 - DNA, 6124 bp, Homo sapiens
  source 1..6124: mol_type = genomic DNA
gaaatggccattttcaagattgcagctctccaaaaagttgtagataatagtgtttctttgtctgaactagaactggctaataaacagtacaatgaactgactgctaagtacagggacatcttgcaaaaagataatatgcttgttcaaagaacaagtaacttggaacacctggaggtaagtttgtgtgattcttgaaccttgtgaaattagccatttttcttcaatatttttgtgtttggggggatttggcagattttaattaaagtttgcctgcatttatataaatttaacagagatataattatccatattattcattcagtttagttataaatattttgttcccacataacacacacacacacacacaatatattatctatttatagtggctgaatgacttctgaatgattatctagatcattctccttaggtcacttgcatgatttagctgaatcaaacctcttttaaccagacatctaagagaaaaaggagcatgaaacaggtagaatattgtaatcaaaggagggaagcactcattaagtgcccatccctttctcttacccctgtacccagaacaaactattctcccatggtccctggcttttgttccttggaatggatgtagccaacagtagctgaaatattaagggctcttcctggaccatggatgcactctgtaaattctcatcattttttattgtagaataaatgtagaattttaatgtagaataaatttatttaatgtagaataaaaaataaaaaaactagagtagaatatcataagttacaatctgtgaatatggaccagaccctttgtagttatcttacagccacttgaactctataccttttactgaggacagaacaagctcctgatttgttcatcttcctcatcagaaatagaggcttatggattttggattattcttatctaagatcctttcacaggagtagaataagatctaattctattagctcaaaagcttttgctggctcatagagacacattcagtaaatgaaaacgttgttctgagtagctttcaggattcctactaaattatgagtcatgtttatcaatattatttagaagtaatcataatcagtttgctttctgctgcttttgccaaagagaggtgattatgttactttttatagaaaattatgcctatttagtgtggtgataatttatttttttccattctccatgtcctctgtcctatcctctccagcattagaaagtcctaggcaagagacatcttgtggataatgtatcaatgagtgatgtttaacgttatcattttcccaaagagtatttttcatctttcctaaagattttttttttttttttttgagatggagtttcattctgtcacccaggctgagtgcagtggcacgatctcggcttaacgcttactgcatcctctgcctcccagattcaagcagttctcctgcctcagcctctgagtagctgggattacaggtgtgcaccaccacaccagctaatttttttttttttttttttttttttgaggcagagtctcgctctgtcacccaggctggagtgcagtggcgccatcttggctcactgcaagctccacctcccgggttcaggccgttctcctgcctcagcctcctgagtagctggtaccacaggcacccaccatcatgcccggctaattttttgtatttttagtagagatggggtttcaccttgttagccaggatggtgtcgatctcctgaactcgtgatccacccgcctcggcctcctaaagtgctgggattacagatgtgagccaccgcacctggccccagttgtaattgtgaatatctcatacctatccctattggcagtgtcttagttttattttttattatctttattgtggcagccattattcctgtctctatctccagtcttacatcctccttactgccacaagaatgatcattctaaacatgaatcctaccctgtgactcccatgtgactccccgccttaaaaactgtcaaaagctaccggttacctgaagggtaaaagtcaagtcccctacttacctcatgtcatctagagcaagagatgaactagctgagttttctgaccacagtgttctttcttatgtatgttcttttgtacgtgctcttttctatatatagggaaccatttctctcttccagttgttttgctcagtgaatttctattcctgtttcaaaacttgttcaggcattaccttttttttcttaagcatactttttttaatggaacaaagtcactcctgtctacactagttctgcatcttatacataggttttgtacatagtacatatttatatcacatcaaattatatgtgtttacatatctgtcttccttaatggaatataagtcttttgatataaggaactatttaatttgtttctgtgtgttgagtatctcctgtttggcacagagttcaagctaatacatgagagtgattagtggtggagagccacagtgcatgtggtgtcaaatatggtgcttaggaaattattgttgctttttgagaggtaaaggttcatgagactagaggtcacgaaaatcagatttcatgtgtgaagaatggaatagataataaggaaatacaaaaactggatgggtaataaagcaaaagaaaaacttgaaatttgatagtagaagaaaaaagaaatagatgtagattgaggtagaatcaagaagaggattctttttttgttgtttttttttttgaaacagagtctcactgtgttgcccaggctggagtgcagtggagtgatcttggcttactgcaacctctgcctcccaggttcaagcgattcttctgcttcagtctcccgagtagctggaattacaggtgcccaccagcacggccggctaatttagtagagacagggttttgccatgttggccgggctggtctcaaactttggatctcaggtaatccgccagcctcaacttcccaaagtgctgggattacaggcatgagccactgtgcccagcctgtttttttttttttaaaggagaccagtgaagtttcaggaggagggaaagaaaatttagagttactagggagagagtgatgaagataagagatgaaagtggtaataagggaaatagcaaaatatcagggtaggtgggagaaaaagagatttgtaacaaacaataggattatcctgtgaaaaaggatgaaaggaagaaaaaaatggatagaaagatatttaaaacaccctcagcctcctgttttccctcctgtgtattcatagtatataaaactataattatgtactttacttaaaaaatatattattattaccttatcgtgcttatttaatcatagcatgtcctctttttagtctcattaccctgtttgtattattcttcataacacttaatacctgacattgtattatatattggcttattttccaggtactccactcaaatataagttctaggatataatttatttatcactgaaatccattgcttagagtacctggcatgtagtaaataggcattctgttttttcaaataaaaaataaaggaacttaagatatatatttatgttatatcgccagcctttttcctcacagctctattctgttgtacagaattacctactttacaattcctgtgtttcaaggggatctcaaatttaacgtgtccacaatgaactcctgatttctgtttctctcctagtcattcttatttcaatatatgttcagttacctaaccagctagtcaaggcagatactttagagttattctgtagtcattctttttccctaccatttttgttttccaaatgtaatttatgtgtgtcttcttcatcctcgcagctctaacccttgtccaaaccagcatcatcactcatctggagttccacaatgtctttctggctagtttccctgatttctctattgacccctttattctccacagtgcagccagaatgattgtttaaaacttcctccttaaaatctttaaattgttttcttttatacgttaagttaaattccagttccttgtcttggcatgccatgccctgcctggtgtggcccctgatggtctctccaacttcatgttttactactattgactcttatttttgcttactctgcttgggtgctccagtcctccaaatcatttcctgctccaatcatttcaatcattttttcctctcagatcttatagtattccaaatgctttcttcctttggagcatctgggtttactaataaatacttcgtacctcacagttcagcttaaatatcaattatttggtggttaagacatccttcaaccgctctatctaaatgttcctttctattattcactggctcagtactctgtttttattttctttctaaatgtcaacttttttttttttgagtcagggtctcactgttgcccaggctcgagtgcagttgcacaatcatagctcattgcagccttgccctcctgggatcaagtaattctcccacctcagcctccaaaatagctgggattacaggtatgcatcaccatgctcagctaattttttgtgtttttttgtagagatgaggtctcactttgttgcccaggctggtctcaaactcctggactcaagtgattctcccacctcagcctcccaaagtgctggggttacaggtgtgagccactgcacctggtcgatactgacttttttttttttttgagatggagttttgctctgttgcccaggctagagcgcagtggtgtgatctcagctcactgcaacctccacctcccaggttaaagggattcttctgcctcagtctcctgagtagctgggattacaggcaagtgccatcatgactggctaatttttgtatttttagcactatgtttagtactgtgttggccaggcttgtctcgaactcctgacctcaagtgatccacccacctcagcctcccaaagtgctgggattacaggtgtgagccaccgtaatcggccaacattgacatttttagtagactttttgtttgtttacttgcttattatctgctgccttccacactctggcgaaatcctgccacccacccacacacacataggcactgaatgggcagaactctgaaggccagaattttatatttcttttcactgtaaacatcatcatctgtcactgatggcacactaggatgctcagcaactgtgtgcatgaaggaagtaagcactagtttgtgaaggctgcaaaactcttgagtattctaagagttttggccaaaatgaatgtacagctttagtggcagaagctaatactcagaaattgaggccgtatattggataacacaggatttggatgattattttaaaataatattttacattgtatatatgtgtgtgtgtgtgtgtgtgtgtgtgtgtatgtgtgtgtgtgtgtatatatatatgtatgtatgtgtattagtccgttctcatgctgctatgaagaaatacctgagactgggtaatttataaaggaaagaggtttaattgactcacagttccacagagctggggaggcctcagaaaacttaacagttatggcagaaggggaagcaaacacatttttcttcacatggtggccggaattagaagaatgtgagccgagcaaaggggaaagccccttataaaaccatcagacatcgtgagaacttactattatgagaatagcgtgggggaaaccacccccacgattcaattacctcccaccaaatccctcccatgacatatgaggattatgggaactatgattcaagatgagatttgggtagggacacagccaaaccatatcagtatgtatatgtatacaagtattatatatatatgtatgtgtttgtatgcatacatgtattatatatggaggaaattctaattttgtaaaaaactggattgtgagttttaaggagatgttatataaagttaagacaatgtcattttgtggtattggtctgaattacaatgtagtttcttagtgatatttttcctttattcagtgtgaaaacatctccttaaaagaacaagtggagtctataaataaagaactggagattaccaaggaaaaacttcacactattgaacaagcctgggaacaggaaactaaattag

What is claimed:

1. A method of editing a nucleobase of a 290-KD centrosomal protein (CEP290) polynucleotide in a cell, the method comprising contacting the cell with:
(a) a base editor polypeptide comprising a nucleic acid programmable DNA binding protein (napDNAbp) domain and a deaminase domain, or
(b) one or more polynucleotides encoding the base editor, and one or more guide polynucleotides, or one or more polynucleotides encoding the one or more guide polynucleotides, wherein the one or more guide polynucleotides target said base editor to effect an alteration of the nucleobase of the CEP290 polynucleotide in the cell.

2. The method of claim 1, wherein the cell is in a subject having Leber's Congenital Amaurosis-10 (LCA10), and the alteration of the nucleobase of the 290-KD centrosomal protein (CEP290) polynucleotide in the cell treats LCA10 in the subject.

3. The method of claim 1, wherein alteration of the nucleobase is associated with any one or more of the following:
an alteration in splicing
an increase in proper splicing of mRNA transcripts transcribed from the CEP290 polynucleotide;
an increase in levels of functional CEP290 polypeptides in the cell;
alleviating one or more symptoms of LCA10 in the subject;
slowing or halting progression of vision loss associated with LCA10 in the subject;
reducing loss of functional rod and/or cone cells associated with LCA10 in the subject.

4. The method of claim 1, wherein the base editor effects an alteration of a nucleobase selected from the group consisting of CEP290 c.2991+1651, CEP290 c.2991+1652, and CEP290 c.2991+1655.

5. The method of claim 4, wherein the base editor effects an alteration of a nucleobase selected from the group consisting of
CEP290 c.2991+1655G>A;
CEP290 c.2991+1652T>C; and
CEP290 c.2991+1652G>A;

6. The method of claim 1, wherein the one or more guide polynucleotides comprise a nucleic acid sequence comprising at least 10 contiguous nucleotides of a spacer corresponding to a nucleic acid sequence selected from the group consisting of:
(SEQ ID NO: 459)
AUACUCACAAUUACAAC;
(SEQ ID NO: 460)
GAUACUCACAAUUACAAC;
(SEQ ID NO: 461)
AGAUACUCACAAUUACAAC;
(SEQ ID NO: 462)
GAGAUACUCACAAUUACAAC;
(SEQ ID NO: 463)
UGAGAUACUCACAAUUACAAC;
(SEQ ID NO: 464)
AUGAGAUACUCACAAUUACAAC;
(SEQ ID NO: 465)
UAUCUCUGAUGAGUCCGUGAGGACGAAACGAGUAAGCUCGUCAGAUACU
CACAAUUACAAC;
(SEQ ID NO: 466)
AUCUCACUGAUGAGUCCGUGAGGACGAAACGAGUAAGCUCGUCUGAGAU
ACUCACAAUUACAAC;
(SEQ ID NO: 467)
UAUCUCAUCUGAUGAGUCCGUGAGGACGAAACGAGUAAGCUCGUCAUGA
GAUACUCACAAUUACAAC;
(SEQ ID NO: 468)
CUCAUACUGAUGAGUCCGUGAGGACGAAACGAGUAAGCUCGUCUAUGAG
AUACUCACAAUUACAAC;
(SEQ ID NO: 469)
ACUCACAAUUACAACUG;
(SEQ ID NO: 470)
UACUCACAAUUACAACUG;
(SEQ ID NO: 471)
AUACUCACAAUUACAACUG;
(SEQ ID NO: 472)
GAUACUCACAAUUACAACUG;
(SEQ ID NO: 473)
AGAUACUCACAAUUACAACUG;
(SEQ ID NO: 474)
CAAUUACAACUGGGGCC;
(SEQ ID NO: 475)
ACAAUUACAACUGGGGCC;
(SEQ ID NO: 476)
CACAAUUACAACUGGGGCC;
(SEQ ID NO: 477)
UCACAAUUACAACUGGGGCC;
(SEQ ID NO: 478)
CUCACAAUUACAACUGGGGCC;
and
(SEQ ID NO: 479)
ACUCACAAUUACAACUGGGGCC;
wherein the one or more guide polynucleotides comprise a scaffold comprising a nucleotide sequence with at least about 85% sequence identity to the following sequence:
(SEQ ID NO: 484)
GUUUUAGAGCUAGAAAUAGCAAGUUAAAAUAAGGCUAGUCCGUUAUCAA
CUUGAAAAAGUGGCACCGAGUCGGUGCUUUUUU;
wherein the one or more guide polynucleotides comprise one or more of a 2′-OMe and a phosphorothioate.

7. The method of claim 1, further comprising contacting the cell with a vector comprising polynucleotide(s) encoding the base editor and/or the one or more guide polynucleotides.

8. The method of claim 1, wherein the vector is a lipid nanoparticle or an adeno-associated virus (AAV) vector.

9. The method of claim 1, wherein the polynucleotide(s) encoding the base editor and/or one or more guide polynucleotides comprises a promoter controlling expression of the base editor and/or one or more guide polynucleotides, wherein the promoter is selected from the group consisting of CMV, PR1.7, hG1.7, hGRK, and U6.

10. The method of claim 1, wherein the promoter is selected from the group consisting of PR1.7, hG1.7, and hGRK.

11. The method of claim 1, wherein the deaminase domain is an adenosine deaminase, a cytidine deaminase domain, or a cytidine adenosine deaminase domain.

12. A modified cell comprising an alteration in a nucleobase of a CEP290 polynucleotide, wherein the alteration increases expression and/or activity of the encoded CEP290 polypeptide as compared to a control cell without the alteration, and wherein the cell is prepared according to the method of claim 1.

13. A base editor system comprising one or more polynucleotides encoding a base editor polypeptide, wherein the base editor polypeptide comprises a nucleic acid programmable DNA binding protein (napDNAbp) domain and a deaminase domain, and one or more guide polynucleotides, or one or more polynucleotides encoding the one or more guide polynucleotides, wherein the one or more guide polynucleotides comprise a spacer sequence comprising at least 10 contiguous nucleotides of a spacer corresponding to a nucleotide sequence selected from the group consisting of:
(SEQ ID NO: 459)
AUACUCACAAUUACAAC;
(SEQ ID NO: 460)
GAUACUCACAAUUACAAC;
(SEQ ID NO: 461)
AGAUACUCACAAUUACAAC;
(SEQ ID NO: 462)
GAGAUACUCACAAUUACAAC;
(SEQ ID NO: 463)
UGAGAUACUCACAAUUACAAC;
(SEQ ID NO: 464)
AUGAGAUACUCACAAUUACAAC;
(SEQ ID NO: 465)
UAUCUCUGAUGAGUCCGUGAGGACGAAACGAGUAAGCUCGUCAGAUACU
CACAAUUACAAC;
(SEQ ID NO: 466)
AUCUCACUGAUGAGUCCGUGAGGACGAAACGAGUAAGCUCGUCUGAGAU
ACUCACAAUUACAAC;
(SEQ ID NO: 467)
UAUCUCAUCUGAUGAGUCCGUGAGGACGAAACGAGUAAGCUCGUCAUGA
GAUACUCACAAUUACAAC;
(SEQ ID NO: 468)
CUCAUACUGAUGAGUCCGUGAGGACGAAACGAGUAAGCUCGUCUAUGAG
AUACUCACAAUUACAAC;
(SEQ ID NO: 469)
ACUCACAAUUACAACUG;
(SEQ ID NO: 470)
UACUCACAAUUACAACUG;
(SEQ ID NO: 471)
AUACUCACAAUUACAACUG;
(SEQ ID NO: 472)
GAUACUCACAAUUACAACUG;
(SEQ ID NO: 473)
AGAUACUCACAAUUACAACUG;
(SEQ ID NO: 474)
CAAUUACAACUGGGGCC;
(SEQ ID NO: 475)
ACAAUUACAACUGGGGCC;
(SEQ ID NO: 476)
CACAAUUACAACUGGGGCC;
(SEQ ID NO: 477)
UCACAAUUACAACUGGGGCC;
(SEQ ID NO: 478)
CUCACAAUUACAACUGGGGCC;
and
(SEQ ID NO: 479)
ACUCACAAUUACAACUGGGGCC.

14. A set of one or more polynucleotides encoding the base editor system of claim 13, or a component thereof.

15. A vector comprising the set of one or more polynucleotides of claim 14.

16. The vector of claim 15, wherein the vector comprises a lipid nanoparticle or a viral vector.

17. A kit comprising a base editor system comprising a base editor polypeptide, or one or more polynucleotides encoding the same, wherein the base editor polypeptide comprises a nucleic acid programmable DNA binding protein (napDNAbp) domain and a deaminase domain, and one or more guide polynucleotides, or one or more polynucleotides encoding the one or more guide polynucleotides, wherein the one or more guide polynucleotides comprise a nucleotide sequence selected from the group consisting of:
(SEQ ID NO: 459)
AUACUCACAAUUACAAC;
(SEQ ID NO: 460)
GAUACUCACAAUUACAAC;
(SEQ ID NO: 461)
AGAUACUCACAAUUACAAC;
(SEQ ID NO: 462)
GAGAUACUCACAAUUACAAC;
(SEQ ID NO: 463)
UGAGAUACUCACAAUUACAAC;
(SEQ ID NO: 464)
AUGAGAUACUCACAAUUACAAC;
(SEQ ID NO: 465)
UAUCUCUGAUGAGUCCGUGAGGACGAAACGAGUAAGCUCGUCAGAUACU
CACAAUUACAAC;
(SEQ ID NO: 466)
AUCUCACUGAUGAGUCCGUGAGGACGAAACGAGUAAGCUCGUCUGAGAU
ACUCACAAUUACAAC;
(SEQ ID NO: 467)
UAUCUCAUCUGAUGAGUCCGUGAGGACGAAACGAGUAAGCUCGUCAUGA
GAUACUCACAAUUACAAC;
(SEQ ID NO: 468)
CUCAUACUGAUGAGUCCGUGAGGACGAAACGAGUAAGCUCGUCUAUGAG
AUACUCACAAUUACAAC;
(SEQ ID NO: 469)
ACUCACAAUUACAACUG;
(SEQ ID NO: 470)
UACUCACAAUUACAACUG;
(SEQ ID NO: 471)
AUACUCACAAUUACAACUG;
(SEQ ID NO: 472)
GAUACUCACAAUUACAACUG;
(SEQ ID NO: 473)
AGAUACUCACAAUUACAACUG;
(SEQ ID NO: 474)
CAAUUACAACUGGGGCC;
(SEQ ID NO: 475)
ACAAUUACAACUGGGGCC;
(SEQ ID NO: 476)
CACAAUUACAACUGGGGCC;
(SEQ ID NO: 477)
UCACAAUUACAACUGGGGCC;
(SEQ ID NO: 478)
CUCACAAUUACAACUGGGGCC;
and
(SEQ ID NO: 479)
ACUCACAAUUACAACUGGGGCC.

18. The kit of claim 17, further comprising written instructions for the use of the kit in the treatment of Leber congenital amaurosis 10 (LCA10).

19. A pharmaceutical composition comprising an effective amount of a base editor system comprising
(a) a base editor polypeptide, wherein the base editor polypeptide comprises a nucleic acid programmable DNA binding protein (napDNAbp) domain and a deaminase domain, or
(b) one or more polynucleotides encoding the base editor polypeptide, and one or more guide polynucleotides, or one or more polynucleotides encoding the one or more guide polynucleotides, wherein the one or more guide polynucleotides comprise a nucleotide sequence selected from the group consisting of:
(SEQ ID NO: 459)
AUACUCACAAUUACAAC;
(SEQ ID NO: 460)
GAUACUCACAAUUACAAC;
(SEQ ID NO: 461)
AGAUACUCACAAUUACAAC;
(SEQ ID NO: 462)
GAGAUACUCACAAUUACAAC;
(SEQ ID NO: 463)
UGAGAUACUCACAAUUACAAC;
(SEQ ID NO: 464)
AUGAGAUACUCACAAUUACAAC;
(SEQ ID NO: 465)
UAUCUCUGAUGAGUCCGUGAGGACGAAACGAGUAAGCUCGUCAGAUACU
CACAAUUACAAC;
(SEQ ID NO: 466)
AUCUCACUGAUGAGUCCGUGAGGACGAAACGAGUAAGCUCGUCUGAGAU
ACUCACAAUUACAAC;
(SEQ ID NO: 467)
UAUCUCAUCUGAUGAGUCCGUGAGGACGAAACGAGUAAGCUCGUCAUGA
GAUACUCACAAUUACAAC;
(SEQ ID NO: 468)
CUCAUACUGAUGAGUCCGUGAGGACGAAACGAGUAAGCUCGUCUAUGAG
AUACUCACAAUUACAAC;
(SEQ ID NO: 469)
ACUCACAAUUACAACUG;
(SEQ ID NO: 470)
UACUCACAAUUACAACUG;
(SEQ ID NO: 471)
AUACUCACAAUUACAACUG;
(SEQ ID NO: 472)
GAUACUCACAAUUACAACUG;
(SEQ ID NO: 473)
AGAUACUCACAAUUACAACUG;
(SEQ ID NO: 474)
CAAUUACAACUGGGGCC;
(SEQ ID NO: 475)
ACAAUUACAACUGGGGCC;
(SEQ ID NO: 476)
CACAAUUACAACUGGGGCC;
(SEQ ID NO: 477)
UCACAAUUACAACUGGGGCC;
(SEQ ID NO: 478)
CUCACAAUUACAACUGGGGCC;
and
(SEQ ID NO: 479)
ACUCACAAUUACAACUGGGGCC.

20. A guide polynucleotide, or a polynucleotide encoding the guide polynucleotide, wherein the guide polynucleotide comprises a nucleotide sequence selected from the group consisting of:
(SEQ ID NO: 438)
GAUACUCACAAUUACAACGUUUUAGAGCUAGAAAUAGCAAGUUAAAAUAAGGCUAGUCCGUU
AUCAACUUGAAAAAGUGGCACCGAGUCGGUGCUUUUUU;
(SEQ ID NO: 439)
gGAUACUCACAAUUACAACGUUUUAGAGCUAGAAAUAGCAAGUUAAAAUAAGGCUAGUCCGU
UAUCAACUUGAAAAAGUGGCACCGAGUCGGUGCUUUUUU;
(SEQ ID NO: 440)
GAGAUACUCACAAUUACAACGUUUUAGAGCUAGAAAUAGCAAGUUAAAAUAAGGCUAGUCCG
UUAUCAACUUGAAAAAGUGGCACCGAGUCGGUGCUUUUUU;
(SEQ ID NO: 441)
gGAGAUACUCACAAUUACAACGUUUUAGAGCUAGAAAUAGCAAGUUAAAAUAAGGCUAGUCC
GUUAUCAACUUGAAAAAGUGGCACCGAGUCGGUGCUUUUUU;
(SEQ ID NO: 442)
gUGAGAUACUCACAAUUACAACGUUUUAGAGCUAGAAAUAGCAAGUUAAAAUAAGGCUAGUC
CGUUAUCAACUUGAAAAAGUGGCACCGAGUCGGUGCUUUUUU;
(SEQ ID NO: 443)
gAUGAGAUACUCACAAUUACAACGUUUUAGAGCUAGAAAUAGCAAGUUAAAAUAAGGCUAGU
CCGUUAUCAACUUGAAAAAGUGGCACCGAGUCGGUGCUUUUUU;
(SEQ ID NO: 444)
GUAUCUCUGAUGAGUCCGUGAGGACGAAACGAGUAAGCUCGUCAGAUACUCACAAUUACAAC
GUUUUAGAGCUAGAAAUAGCAAGUUAAAAUAAGGCUAGUCCGUUAUCAACUUGAAAAAGUGG
CACCGAGUCGGUGCUUUUUU;
(SEQ ID NO: 445)
gAUCUCACUGAUGAGUCCGUGAGGACGAAACGAGUAAGCUCGUCUGAGAUACUCACAAUUAC
AACGUUUUAGAGCUAGAAAUAGCAAGUUAAAAUAAGGCUAGUCCGUUAUCAACUUGAAAAAG
UGGCACCGAGUCGGUGCUUUUUU;
(SEQ ID NO: 446)
gUAUCUCAUCUGAUGAGUCCGUGAGGACGAAACGAGUAAGCUCGUCAUGAGAUACUCACAAU
UACAACGUUUUAGAGCUAGAAAUAGCAAGUUAAAAUAAGGCUAGUCCGUUAUCAACUUGAAA
AAGUGGCACCGAGUCGGUGCUUUUUU;
(SEQ ID NO: 447)
gCUCAUACUGAUGAGUCCGUGAGGACGAAACGAGUAAGCUCGUCUAUGAGAUACUCACAAUU
ACAACGUUUUAGAGCUAGAAAUAGCAAGUUAAAAUAAGGCUAGUCCGUUAUCAACUUGAAAA
AGUGGCACCGAGUCGGUGCUUUUUU;
(SEQ ID NO: 448)
gACUCACAAUUACAACUGGUUUUAGAGCUAGAAAUAGCAAGUUAAAAUAAGGCUAGUCCGUU
AUCAACUUGAAAAAGUGGCACCGAGUCGGUGCUUUUUU;
(SEQ ID NO: 449)
gUACUCACAAUUACAACUGGUUUUAGAGCUAGAAAUAGCAAGUUAAAAUAAGGCUAGUCCGU
UAUCAACUUGAAAAAGUGGCACCGAGUCGGUGCUUUUUU;
(SEQ ID NO: 450)
GAUACUCACAAUUACAACUGGUUUUAGAGCUAGAAAUAGCAAGUUAAAAUAAGGCUAGUCCG
UUAUCAACUUGAAAAAGUGGCACCGAGUCGGUGCUUUUUU;
(SEQ ID NO: 451)
gGAUACUCACAAUUACAACUGGUUUUAGAGCUAGAAAUAGCAAGUUAAAAUAAGGCUAGUCC
GUUAUCAACUUGAAAAAGUGGCACCGAGUCGGUGCUUUUUU;
(SEQ ID NO: 452)
GAGAUACUCACAAUUACAACUGGUUUUAGAGCUAGAAAUAGCAAGUUAAAAUAAGGCUAGUC
CGUUAUCAACUUGAAAAAGUGGCACCGAGUCGGUGCUUUUUU;
(SEQ ID NO: 453)
gCAAUUACAACUGGGGCCGUUUUAGAGCUAGAAAUAGCAAGUUAAAAUAAGGCUAGUCCGUU
AUCAACUUGAAAAAGUGGCACCGAGUCGGUGCUUUUUU;
(SEQ ID NO: 454)
gACAAUUACAACUGGGGCCGUUUUAGAGCUAGAAAUAGCAAGUUAAAAUAAGGCUAGUCCGU
UAUCAACUUGAAAAAGUGGCACCGAGUCGGUGCUUUUUU;
(SEQ ID NO: 455)
gCACAAUUACAACUGGGGCCGUUUUAGAGCUAGAAAUAGCAAGUUAAAAUAAGGCUAGUCCG
UUAUCAACUUGAAAAAGUGGCACCGAGUCGGUGCUUUUUU;
(SEQ ID NO: 456)
gUCACAAUUACAACUGGGGCCGUUUUAGAGCUAGAAAUAGCAAGUUAAAAUAAGGCUAGUCC
GUUAUCAACUUGAAAAAGUGGCACCGAGUCGGUGCUUUUUU;
(SEQ ID NO: 457)
gCUCACAAUUACAACUGGGGCCGUUUUAGAGCUAGAAAUAGCAAGUUAAAAUAAGGCUAGUC
CGUUAUCAACUUGAAAAAGUGGCACCGAGUCGGUGCUUUUUU;
(SEQ ID NO: 458)
gACUCACAAUUACAACUGGGGCCGUUUUAGAGCUAGAAAUAGCAAGUUAAAAUAAGGCUAGU
CCGUUAUCAACUUGAAAAAGUGGCACCGAGUCGGUGCUUUUUU;
(SEQ ID NO: 459)
AUACUCACAAUUACAAC;
(SEQ ID NO: 460)
GAUACUCACAAUUACAAC;
(SEQ ID NO: 461)
AGAUACUCACAAUUACAAC;
(SEQ ID NO: 462)
GAGAUACUCACAAUUACAAC;
(SEQ ID NO: 463)
UGAGAUACUCACAAUUACAAC;
(SEQ ID NO: 464)
AUGAGAUACUCACAAUUACAAC;
(SEQ ID NO: 465)
UAUCUCUGAUGAGUCCGUGAGGACGAAACGAGUAAGCUCGUCAGAUACU
CACAAUUACAAC;
(SEQ ID NO: 466)
AUCUCACUGAUGAGUCCGUGAGGACGAAACGAGUAAGCUCGUCUGAGAU
ACUCACAAUUACAAC;
(SEQ ID NO: 467)
UAUCUCAUCUGAUGAGUCCGUGAGGACGAAACGAGUAAGCUCGUCAUGA
GAUACUCACAAUUACAAC;
(SEQ ID NO: 468)
CUCAUACUGAUGAGUCCGUGAGGACGAAACGAGUAAGCUCGUCUAUGAG
AUACUCACAAUUACAAC;
(SEQ ID NO: 469)
ACUCACAAUUACAACUG;
(SEQ ID NO: 470)
UACUCACAAUUACAACUG;
(SEQ ID NO: 471)
AUACUCACAAUUACAACUG;
(SEQ ID NO: 472)
GAUACUCACAAUUACAACUG;
(SEQ ID NO: 473)
AGAUACUCACAAUUACAACUG;
(SEQ ID NO: 474)
CAAUUACAACUGGGGCC;
(SEQ ID NO: 475)
ACAAUUACAACUGGGGCC;
(SEQ ID NO: 476)
CACAAUUACAACUGGGGCC;
(SEQ ID NO: 477)
UCACAAUUACAACUGGGGCC;
(SEQ ID NO: 478)
CUCACAAUUACAACUGGGGCC;
and
(SEQ ID NO: 479)
ACUCACAAUUACAACUGGGGCC.
